(19) United States
(12) Patent Application Publication
(10) Pub. No.: US 2025/0268953 A1
(43) Pub. Date: Aug. 28, 2025

(54) COMPOSITIONS AND METHODS FOR TREATING DISEASE II

(71) Applicant: MICROBA IP PTY LTD, Brisbane (AU)

(72) Inventors: Páraic Ó CUÍV, Brisbane (AU); Lutz KRAUSE, Brisbane (AU)

(21) Appl. No.: 18/578,275

(22) PCT Filed: Jul. 11, 2022
(86) PCT No.: PCT/AU2022/050726

§ 371 Date: Jan. 10, 2024

(30) Foreign Application Priority Data
Jul. 10, 2021 (AU) 2021902122
Sep. 13, 2021 (AU) 2021902960
Feb. 9, 2022 (AU) 2022900261

(51) Int. Cl. A61K 35/741; A61K 35/00; A61P 1/04

(52) U.S. Cl. CPC A61K 35/741; A61P 1/04; A61K 2035/115

(57) ABSTRACT

Disclosed are therapeutic compositions comprising bacterial strains and methods for the treatment or prevention of disease. More particularly, disclosed are compositions comprising bacterial strains isolated from the human digestive tract and their use in the treatment or prevention of inflammatory and autoimmune disorders. Also disclosed are novel bacterial strains and isolated populations of therapeutic importance.

### RELATED APPLICATIONS

[0001] This application claims priority to Australian Provisional Application No. 2021902122 entitled “Compositions and methods for treating disease” filed on 10 Jul. 2021, Australian Provisional Application No. 2021902960 entitled “Compositions and methods for treating disease” filed on 13 Sep. 2021, and Australian Provisional Application No. 2022900261 entitled “Compositions and methods for treating disease” filed on 9 Feb. 2022, the entire contents of which are hereby incorporated herein by reference

### FIELD OF THE INVENTION

[0002] This invention relates generally to the field of therapeutic compositions comprising bacterial strains and methods for the treatment or prevention of disease. More particularly, the present invention relates to compositions comprising bacterial strains isolated from the human digestive tract and their use in the treatment or prevention of inflammatory and autoimmune disorders.

### BACKGROUND OF THE INVENTION

[0003] The human gut microbiota contains more than 500-1000 different phylotypes belonging to a few bacterial phylum, including Firmicutes, Bacteroidetes, Proteobacteria, Fusobacteria, and Verrucomicrobia. The two major phyla, the Bacteroidetes and the Firmicutes, generally represent over 90% of the gut microbiota (Arumugam et al., 2011). The successful symbiotic relationships arising from bacterial colonisation of the human gut have yielded a wide variety of metabolic, structural, protective and other beneficial functions. The gut bacteria are key regulators of digestion along the gastrointestinal (GI) tract; with commensal bacterial playing an important role in the extraction, synthesis, and absorption of many nutrients and metabolites, including bile acids, lipids, amino acids, vitamins, and short-chain fatty acids (SCFAs). More recently, the immunological importance of the gut microbiota and their products in regulating the development, homeostasis, and function of innate and adaptive immune cells have been recognised (Brestoff and Atris, 2013).

[0004] It is now increasingly recognised that the gut microbiome regulates host intestinal mucosal immunity and predisposition to inflammation (Geva-Zatorsky et al., 2017; Kabat et al., 2014), opening new avenues for novel therapeutic interventions.

[0005] Dramatic changes in microbiota composition have been documented in many inflammatory and autoimmune disorders, including inflammatory bowel disease (IBD). In recognition of the potential positive effect that certain bacterial strains may have on the animal gut, various strains have been proposed for use in the treatment of various diseases. Certain strains, including Lactobacillus and Bifidobacterium strains, have been proposed for use in treating various extraintestinal inflammatory and autoimmune disorders (see, Goldin & Gorbach, 2008; Azad et al., 2013). However, the precise effects of particular bacterial strains locally at the GI tract and systemically throughout the body are unresolved. As a result, the relationships between different diseases and different bacterial strains in the human GI tract are yet to be clearly elucidated.

[0006] IBD (including the two major disease subtypes Crohn's disease (CD) and ulcerative colitis (UC)) is characterised by episodic and disabling inflammation of the GI tract. In 2017, it is estimated that 6.8 million people globally suffered from IBD, with the highest prevalence in the United States and Europe (GBD 2017; Inflammatory Bowel Disease Collaborators, 2019). Up to 20% of patients are diagnosed before the age of 16 and paediatric-onset IBD (PIBD) is associated with a more complicated and aggressive disease with adverse impacts on growth and psychosocial development.

[0007] There is currently no cure for IBD, and long-term clinical management requires effective therapeutics with an excellent safety profile. However, existing treatments show a range of deficiencies and remission is generally short. Moreover, IBD therapeutics are ineffective where early onset coupled with more aggressive disease result in progressive bowel damage and need for surgery. There is an urgent need to develop more effective and safe therapies to improve patient quality of life, maintain remission over long periods, reduce surgery and curtail individual and public health costs.

[0008] Existing treatments for IBD are sub-optimal with strong adverse effects, low compliance (50% average non-adherence rates (see, Chan et al., 2017)) and high cost. Furthermore, there is no effective solution to maintaining extended periods of disease-free remission. Mesalmine, one of the most widely used first line therapies for mild to moderate flares of ulcerative colitis and for maintenance of remission, has response rates between 40%-70% and remission rates of 15%-20% (Karagozian & Burakoff, 2007).

[0009] There is a requirement in the art for new methods of treating inflammatory and autoimmune disorders. There is also a requirement for the potential effects of gut bacteria to be characterised so that new therapies using gut bacteria can be developed.

### SUMMARY OF THE INVENTION

[0010] The present invention is predicated in part on the inventors identifying a number of bacterial strains, including Alistipes shahii, Gemmiger formicilis, and Colonithrix sana, enhance or improve gut barrier function. Based on this consideration, it is proposed that strains of these and closely related species are particularly suited to therapeutic applications for treating and preventing inflammatory and autoimmune disorders, as described hereinafter.

[0011] The inventors have developed new compositions comprising a viable bacterial strain of a species selected from Alistipes shahii, Gemmiger formicilis, and Colonithrix sana, that can be used for treating and preventing inflammatory and autoimmune disorders.

[0012] Accordingly, in one aspect the invention provides a cell of the Alistipes shahii strain deposited under any one of accession numbers V21/014432, V21/014433, or V21/014434, or a derivative thereof.

[0013] In some embodiments, the cell is at least partially isolated.

[0014] In another aspect, the invention provides a biologically pure culture of the Alistipes shahii strain deposited under any one of accession numbers V21/014432, V21/014433, or V21/014434, or a derivative thereof.

[0015] In another aspect, the present invention provides a composition comprising the cell or culture as described above and elsewhere herein.

[0016] In yet another aspect, the present invention provides a composition comprising a bacterial strain with a 16S rRNA sequence that is at least about 97.5%, 98%, 98.5% 99%, 99.1%, 99.2%, 99.3%, 99.4%, 99.5%, 99.6%, 99.7%, 99.8%, or 99.9%, identical to any one of SEQ ID NOs: 1-3 or 44; or with a 16S rRNA sequence represented by any one of SEQ ID NOs: 1-3 or 44. In some embodiments, the bacterial strain comprises two or more copies of a 16S rRNA sequence in its genome (e.g., two copies, three copies, four copies, five copies, six copies, seven copies, eight copies).

[0017] In some embodiments, the composition further comprises a pharmaceutically acceptable excipient, diluent, or carrier.

[0018] In yet another aspect, the present invention provides a pharmaceutical composition comprising a bacterial strain with a 16S rRNA sequence that is at least about 97%, 98%, 99%, 99.5%, 99.6%, 99.7%, 99.8%, or 99.9% identical to the 16S rRNA sequence of a bacterial strain of the Alistipes shahii, together with a pharmaceutically acceptable carrier, diluent, or excipient.

[0019] In a related aspect, the present invention provides a pharmaceutical composition comprising an effective amount of a bacterial strain that is a phylogenetic descendant of the most recent common ancestor (MRCA) of A. timonensis and A. shahii, together with a pharmaceutically acceptable carrier, diluent, or excipient. Suitably, the MRCA is defined at node 35262 of the bac120 phylogenetic tree from the Genome Taxonomy Database (GTDB). In some embodiments, the phylogenetic tree is created by release 89 of the GTDB, however, any subsequent release is considered to give equally as applicable results. In some preferred embodiments of this type, the bacterial strain is of the species A. shahii.

[0020] Typically, the bacterial strain is at least partially isolated.

[0021] In some embodiments, the bacterial strain is live. In some alternative embodiments, the bacterial strain is dead.

[0022] In some embodiments, the compositions further comprise a prebiotic.

[0023] In some embodiments, the composition is formulated in a dried form. Typically, the composition is dried using techniques selected from lyophilisation, spray drying, fluidized bed drying, vacuum drying, or a combination thereof.

[0024] In some embodiments, the composition is formulated for oral administration.

[0025] In some embodiments, the bacterial strain produces an agent that attenuates or impairs signal transducer and activator of transcription 3 (STAT3) signalling in a cell.

[0026] In some embodiments of this type, the agent is a small molecule, peptide, or nucleotide. Typically, the agent is released by the bacterial strain.

[0027] In some embodiments, the agent binds specifically to any one of STAT3, JAK2, TYK2, or IL-23.

[0028] In some embodiments, the A. shahii metabolizes one or more agents selected from the group comprising or consisting of starch, glucose, fructose, gluconate, lactose, trehalose, and lactaldehyde as a carbon source.

[0029] In another aspect, the present invention provides a method of restoring or improving gut barrier function in a subject, the method comprising administering to the subject a bacterial strain of the species A. shahii, to thereby restore or improve gut barrier function.

[0030] In some preferred embodiments, restoring or improving gut barrier function is characterised by at least one of: (i) an increase in the quality and/or quantity of mucin; (ii) improvement in integrity of tight junction proteins; (iii) reduction in translocation of luminal contents into systemic circulation; or (iv) reduction of intestinal ulcers and/or intestinal wounds.

[0031] In some embodiments, the luminal contents includes lipopolysaccharide (LPS).

[0032] In some embodiments, the restoration or improvement in gut barrier function results in a reduction in systemic inflammation in the subject. In some embodiments of this type, the systemic inflammation is characterized by elevated levels of an inflammatory cytokine (e.g., IL-1β IL-8, IL-6, and TNF) in the subject as compared to the level of the inflammatory cytokine in a healthy subject.

[0033] In yet another aspect, the present invention provides a method of maintaining gut barrier function in a subject, the method comprising administering to the subject a bacterial strain of the species A. shahii, to thereby maintain gut barrier function in the subject.

[0034] In yet another aspect, the present invention provides a method of reducing inflammation in a subject, the method comprising administering to the subject a bacterial strain of the strain A. shahii, to thereby reduce inflammation in the subject.

[0035] In some embodiments, the inflammation is local to the gut environment, or systemic inflammation.

[0036] In another aspect, the present invention provides a method of inducing or enhancing mucosal healing in a subject, the method comprising administering to the subject a bacterial strain of the species A. shahii in an amount sufficient to induce epithelial cell migration, proliferation and/or differentiation, to thereby induce mucosal healing in the subject.

[0037] In some embodiments, mucosal healing in the subject can be measured using one or more fecal or serum markers. By way of an illustrative example, one or more fecal markers may be selected from the group comprising calprotectin, lactoferrin, metalloproteinase (MMP)-9, and lipocalin-2.

[0038] In some embodiments, the bacterial strain reduces inflammation by attenuating the NFκB pathway. In some embodiments of this type, the bacterial strain inhibits the production of one or more transcription factors, cytokines, or chemokines selected from the group comprising NFκB, TNF, IFN-γ, IL-1β, IL-8, and MCP-1.

[0039] In yet another aspect, the present invention provides methods of blocking or otherwise inhibiting STAT3 signalling in a target cell, the method comprising contacting the cell with at least a soluble component of a bacterial cell preparation of the species A. shahii, to block or otherwise inhibit STAT3 signalling in the cell. Typically, the method of this aspect is performed in vitro.

[0040] In some embodiments, the target cell is selected from a reporter cell (e.g., a HEK cell), an immune cell (e.g., a Th17 immune cell), an epithelial cell, or an endothelial cell. In some embodiments, the target cell is a mammalian cell, and preferably, a human cell.

[0041] In some embodiments, the bacterial cell preparation is a bacterial cell culture. The soluble component may therefore comprise, consist, or consist essentially of, the soluble fraction of the bacterial cell culture (e.g., the cell culture supernatant). The soluble component may further comprise some insoluble components of the bacterial cell culture. For example, the soluble component may include substantially all of the bacterial culture. Preferably, the soluble component is substantially depleted of bacterial cells.

[0042] In some alternative embodiments, the bacterial cell preparation is a bacterial cell lysate. In exemplary embodiments of this type, the soluble component may relate to the soluble fraction of the cell lysate. A soluble fraction can suitably be achieved by any method, including by centrifugation.

[0043] In still yet another aspect, the present invention provides a method of blocking or otherwise inhibiting STAT3 signalling in a cell, the method comprising administering a bacterial strain of the species A. shahii to the subject, thereby blocking or otherwise inhibiting STAT3 signalling in the cell. Typically, the methods of this aspect are performed in vivo.

[0044] In some embodiments, the cell is an immune cell (e.g., a Th17 immune cell) or epithelial cell.

[0045] In some embodiments, the cell is an epithelial cell, and the bacterial strain or a metabolite produced by the bacterial strain increases the production of IL-22 in the subject.

[0046] In some embodiments, the bacterial strain produces a molecule that is a direct inhibitor or an indirect inhibitor of STAT3. For example, the bacterial strain may produce a metabolite that directly inhibits at least one of an IL-23 polypeptide, a JAK2 polypeptide, a TYK2 polypeptide, or a STAT3 polypeptide.

[0047] In some embodiments, the bacterial strains used in the methods described above and elsewhere herein produce one or more metabolites selected from butyrate, acetate, ethanol and fumarate.

[0048] In some embodiments the bacterial strain has a 16S rRNA sequence that is at least about 97.5%, 98.5%, 99%, 99.1%, 99.2%, 99.3%, 99.4%, 99.5%, 99.6%, 99.7%, 99.8%, 99.9% identical to the 16S rRNA sequence of a bacterial strain of A. shahii.

[0049] In some alternative embodiments, the bacterial strain has a 16S rRNA sequence that is at least about 97.5%, 98.5%, 99%, 99.1%, 99.2%, 99.3%, 99.4%, 99.5%, 99.6%, 99.7%, 99.8%, 99.9% identical to any one of SEQ ID NOs: 1-3 or 44, or when the bacterial strain has the 16S rRNA gene sequence represented by any one of SEQ ID NOs: 1-3 or 44. In some embodiments, the bacterial strain comprises two or more copies (e.g., two copies, three copies, four copies, five copies, six copies, seven copies, eight copies) independently selected from the 16S rRNA sequences set forth in any one of SEQ ID NOs: 1-3 or 44.

[0050] In some embodiments, the bacterial strain is the A. shahii strain deposited under any one of accession numbers V21/014432, V21/014433, or V21/014434, or a derivative thereof.

[0051] Preferably, the bacterial strain is at least partially isolated.

[0052] In some embodiments, the bacterial strain is formulated as a pharmaceutical composition, further comprising a pharmaceutically acceptable carrier, diluent or excipient. In some embodiments, the pharmaceutical composition is a dry composition. In some embodiments, the dry composition is selected from the group consisting of particles, granules, and powder. By way of an illustrative example the pharmaceutical composition may be lyophilised, spray dried, fluidized bed dried, vacuum dried, or a combination thereof.

[0053] In some embodiments, the pharmaceutical composition is formulated for oral administration.

[0054] In still yet other aspects, the present invention provides a method of treating an inflammatory or autoimmune disorder in a subject, the method comprising administering an effective amount of a bacterial strain of A. shahii to the subject, to thereby treat or prevent the inflammatory or autoimmune disorder.

[0055] In some embodiments, the inflammatory or autoimmune disorder is selected from the group comprising an inflammatory bowel disease (such as Crohn's disease or ulcerative colitis); asthma (such as allergic asthma or neutrophilic asthma); fatty liver disease (such as non-alcoholic fatty liver disease (NAFLD)); ankylosing spondylitis; systemic lupus erythematosus (SLE); scleroderma; Sjogren's syndrome; and vasculitis. Preferably, the inflammatory or autoimmune disorder is an inflammatory bowel disease (IBD).

[0056] In some embodiments, the bacterial strain blocks or otherwise inhibits STAT3 signalling in at least a cell of the subject. Typically, the cell is an epithelial cell, endothelial cell, or an immune cell (e.g., a Th17 immune cell).

[0057] In some embodiments, the bacterial strain has a 16S rRNA sequence that is at least about 98%, 98.5, 99%, 99.1%, 99.2%, 99.3%, 99.4%, 99.5%, 99.6%, 99.7%, 99.8%, or 99.9% identical to the 16S rRNA sequence of a bacterial strain of A. shahii.

[0058] Alternatively, in some embodiments the bacterial strain has a 16S rRNA sequence that is at least about 98%, 98.5, 99%, 99.1%, 99.2%, 99.3%, 99.4%, 99.5%, 99.6%, 99.7%, 99.8%, or 99.9% identical to any one of SEQ ID NOs: 1-4 or 44, or when the bacterial strain has the 16S rRNA gene sequence represented by any one of SEQ ID NOs: 1-3 or 44.

[0059] Preferably, the bacterial strain is at least partially isolated.

[0060] In some embodiments, the bacterial strain is formulated as a pharmaceutical composition, together with a pharmaceutically acceptable carrier, diluent, and/or excipient. In some embodiments, the composition is a dry composition selected from the group consisting of particles, granules, and powder. For example, the composition may be lyophilised. Alternatively, the composition may be spray dried, fluidized bed dried, or vacuum dried.

[0061] In some embodiments, the composition is formulated for oral administration.

[0062] In one aspect, the present invention provides a composition comprising a bacterial strain of the genus Alistipes for use in therapy.

[0063] In another aspect, the present invention provides a composition comprising a bacterial strain of A. shahii, for use in therapy. In some of the same embodiments and some other embodiments, the bacterial strain has a 16S rRNA sequence that is at least about 98%, 98.5, 99%, 99.1%, 99.2%, 99.3%, 99.4%, 99.5%, 99.6%, 99.7%, 99.8%, or 99.9% identical to the 16S rRNA sequence of a bacterial strain of A. shahii.

[0064] Alternatively, the bacterial strain may have a 16S rRNA sequence that is at least about 98%, 98.5, 99%, 99.1%, 99.2%, 99.3%, 99.4%, 99.5%, 99.6%, 99.7%, 99.8%, or 99.9% identical to any one of SEQ ID NOs: 1-3 or 44, or when the bacterial strain has the 16S rRNA gene sequence represented by any one of SEQ ID NOs: 1-3 or 44.

[0065] In yet another aspect, the present invention provides a composition comprising a bacterial strain of the genus Alistipes, for use in the treatment or prevention of an inflammatory or autoimmune disorder.

[0066] In still yet another aspect, the present invention provides a composition comprising a bacterial strain of A. shahii, for use in the treatment or prevention of an inflammatory or autoimmune disorder.

[0067] In some embodiments, the bacterial strain is the A. shahii strain deposited under any one of accession numbers V21/014432, V21/014433, or V21/014434, or a derivative thereof.

[0068] In some embodiments, the inflammatory or autoimmune disorder is selected from an inflammatory bowel disease (such as Crohn's disease or ulcerative colitis); asthma (such as allergic asthma or neutrophilic asthma); arthritis (such as rheumatoid arthritis, osteoarthritis, psoriatic arthritis, or juvenile idiopathic arthritis); fatty liver disease (such as nonalcoholic fatty liver disease (NAFLD)); ankylosing spondylitis; psoriasis; systemic lupus erythematosus (SLE); scleroderma; Sjogren's syndrome; and type 1 diabetes mellitus. In some preferred embodiments, the inflammatory or autoimmune disorder is an inflammatory bowel disease (IBD).

[0069] In one aspect, the present invention provides a composition for use in treating an inflammatory or autoimmune disorder, the composition comprising a bacterial strain of A. shahii; and an ancillary treatment agent.

[0070] In some embodiments, the ancillary treatment agent is an anti-inflammatory agent. By way of an illustrative example, the anti-inflammatory agent is selected from the group comprising 5-aminosalicylates, corticosteroids, azathioprine, or a combination thereof. In some other embodiments, the ancillary treatment is an antibody (e.g., a monoclonal antibody). By way of an illustrative example, the antibody may be selected from infliximab, adalimumab, golimumab, certolizumab pegol, natalizumab, and vedolizumab.

[0071] In another aspect, the present invention provides a composition for use in treating an inflammatory or autoimmune disorder, the composition comprises a bacterial strain of A. shahii; and a nutritional supplement. In embodiments of this type, the nutritional supplement improves engraftment of the bacterial stain.

[0072] In another aspect the invention provides a cell of the C. sana strain deposited under the accession number V21/019213 or V21/019214, or a derivative thereof.

[0073] In some embodiments, the cell is at least partially isolated.

[0074] In another aspect, the invention provides a biologically pure culture of the C. sana strain deposited under accession number V21/019213 or V21/019214, or a derivative thereof.

[0075] In another aspect, the present invention provides a composition comprising the cell or culture as described above and elsewhere herein.

[0076] In yet another aspect, the present invention provides a composition comprising a bacterial strain with a 16S rRNA sequence that is at least about 97.5%, 98%, 98.5% 99%, 99.1%, 99.2%, 99.3%, 99.4%, 99.5%, 99.6%, 99.7%, 99.8%, or 99.9%, identical to any one of SEQ ID NOs: 11-18; or with a 16S rRNA sequence represented by any one of SEQ ID NOs: 11-18. In some embodiments, the bacterial strain comprises two or more copies of a 16S rRNA sequence in its genome (e.g., two copies, three copies, four copies, five copies, six copies, seven copies, eight copies). For example, the bacterial strain may comprise four copies of a 16S rRNA sequence in its genome (e.g., each of SEQ ID NOs: 11-14; or each of SEQ ID NOs: 15-18).

[0077] In some embodiments, the composition further comprises a pharmaceutically acceptable excipient, diluent, or carrier.

[0078] In yet another aspect, the present invention provides a pharmaceutical composition comprising a bacterial strain with a 16S rRNA sequence that is at least about 97%, 98%, 99%, 99.5%, 99.6%, 99.7%, 99.8%, or 99.9% identical to the 16S rRNA sequence of a bacterial strain of the C. sana, together with a pharmaceutically acceptable carrier, diluent, or excipient.

[0079] In a related aspect, the present invention provides a pharmaceutical composition comprising an effective amount of a bacterial strain that is a phylogenetic descendant of the most recent common ancestor (MRCA) of C. sana and C. sp002437735, together with a pharmaceutically acceptable carrier, diluent, or excipient. Suitably, the MRCA is defined at node 23879 of the bac120 phylogenetic tree from the Genome Taxonomy Database (GTDB). In some embodiments, the phylogenetic tree is created by release 89 of the GTDB, however, any subsequent release is considered to give equally as appliable results. In some preferred embodiments of this type, the bacterial strain is of C. sana.

[0080] Typically, the bacterial strain is at least partially isolated.

[0081] In some embodiments, the bacterial strain is live. In some alternative embodiments, the bacterial strain is dead.

[0082] In some embodiments, the compositions further comprise a prebiotic.

[0083] In some embodiments, the composition is formulated in a dried form. Typically, the composition is dried using techniques selected from lyophilization, spray drying, fluidized bed drying, vacuum drying, or a combination thereof.

[0084] In some embodiments, the composition is formulated for oral administration.

[0085] In some embodiments, the bacterial strain produces an agent that attenuates or impairs signal transducer and activator of transcription 3 (STAT3) signalling in a cell.

[0086] In some embodiments of this type, the agent is a small molecule, peptide, or nucleotide. Typically, the agent is released by the bacterial strain.

[0087] In some embodiments, the agent binds specifically to any one of STAT3, JAK2, TYK2, or IL-23.

[0088] In some embodiments, the C. sana metabolizes one or more agents selected from the group comprising or consisting of starch, glucose, fructose, gluconate, lactose, trehalose, and lactaldehyde as a carbon source.

[0089] In another aspect, the present invention provides a method of restoring or improving gut barrier function in a subject, the method comprising administering to the subject a bacterial strain of the species C. sana, to thereby restore or improve gut barrier function.

[0090] In some preferred embodiments, restoring or improving gut barrier function is characterised by at least one of: (i) an increase in the quality and/or quantity of mucin; (ii) improvement in integrity of tight junction proteins; (iii) reduction in translocation of luminal contents into systemic circulation; or (iv) reduction of intestinal ulcers and/or intestinal wounds.

[0091] In some embodiments, the luminal contents includes lipopolysaccharide (LPS).

[0092] In some embodiments, the restoration or improvement in gut barrier function results in a reduction in systemic inflammation in the subject. In some embodiments of this type, the systemic inflammation is characterised by elevated levels of an inflammatory cytokine (e.g., IL-1β IL-8, IL-6, and TNF) in the subject as compared to the level of the inflammatory cytokine in a healthy subject.

[0093] In yet another aspect, the present invention provides a method of maintaining gut barrier function in a subject, the method comprising administering to the subject a bacterial strain of the species C. sana, to thereby maintain gut barrier function in the subject.

[0094] In yet another aspect, the present invention provides a method of reducing inflammation in a subject, the method comprising administering to the subject a bacterial strain of the strain C. sana, to thereby reduce inflammation in the subject.

[0095] In some embodiments, the inflammation is local to the gut environment, or systemic inflammation.

[0096] In another aspect, the present invention provides a method of inducing or enhancing mucosal healing in a subject, the method comprising administering to the subject a bacterial strain of the species C. sana in an amount sufficient to induce epithelial cell migration, proliferation and/or differentiation, to thereby induce mucosal healing in the subject.

[0097] In some embodiments, mucosal healing in the subject can be measured using one or more fecal or serum markers. By way of an illustrative example, one or more fecal markers may be selected from the group comprising calprotectin, lactoferrin, metalloproteinase (MMP)-9, and lipocalin-2.

[0098] In some embodiments, the bacterial strain reduces inflammation by attenuating the NFκB pathway. In some embodiments of this type, the bacterial strain inhibits the production of one or more transcription factors, cytokines, or chemokines selected from the group comprising NFκB, TNF, IFN-γ, IL-1β, IL-8, and MCP-1.

[0099] In yet another aspect, the present invention provides methods of blocking or otherwise inhibiting STAT3 signalling in a target cell, the method comprising contacting the cell with at least a soluble component of a bacterial cell preparation of the species C. sana, to block or otherwise inhibit STAT3 signalling in the cell. Typically, the method of this aspect is performed in vitro.

[0100] In some embodiments, the target cell is selected from a reporter cell (e.g., a HEK cell), an immune cell (e.g., a Th17 immune cell), an epithelial cell, or an endothelial cell. In some embodiments, the target cell is a mammalian cell, and preferably, a human cell.

[0101] In some embodiments, the bacterial cell preparation is a bacterial cell culture. The soluble component may therefore comprise, consist, or consist essentially of, the soluble fraction of the bacterial cell culture (e.g., the cell culture supernatant). The soluble component may further comprise some insoluble components of the bacterial cell culture. For example, the soluble component may include substantially all of the bacterial culture. Preferably, the soluble component is substantially depleted of bacterial cells.

[0102] In some alternative embodiments, the bacterial cell preparation is a bacterial cell lysate. In exemplary embodiments of this type, the soluble component may relate to the soluble fraction of the cell lysate. A soluble fraction can suitably be achieved by any method, including by centrifugation.

[0103] In still yet another aspect, the present invention provides a method of blocking or otherwise inhibiting STAT3 signalling in a cell, the method comprising administering a bacterial strain of the species C. sana to the subject, thereby blocking or otherwise inhibiting STAT3 signalling in the cell. Typically, the methods of this aspect are performed in vivo.

[0104] In some embodiments, the cell is an immune cell (e.g., a Th17 immune cell) or epithelial cell.

[0105] In some embodiments, the cell is an epithelial cell, and the bacterial strain or a metabolite produced by the bacterial strain increases the production of IL-22 in the subject.

[0106] In some embodiments, the bacterial strain produces a molecule that is a direct inhibitor or an indirect inhibitor of STAT3. For example, the bacterial strain may produce a metabolite that directly inhibits at least one of an IL-23 polypeptide, a JAK2 polypeptide, a TYK2 polypeptide, or a STAT3 polypeptide.

[0107] In some embodiments, the bacterial strains used in the methods described above and elsewhere herein produce one or more metabolites selected from butyrate, acetate, ethanol and fumarate.

[0108] In some embodiments the bacterial strain has a 16S rRNA sequence that is at least about 97.5%, 98.5%, 99%, 99.1%, 99.2%, 99.3%, 99.4%, 99.5%, 99.6%, 99.7%, 99.8%, 99.9% identical to the 16S rRNA sequence of a bacterial strain of C. sana.

[0109] In some alternative embodiments, the bacterial strain has a 16S rRNA sequence that is at least about 97.5%, 98.5%, 99%, 99.1%, 99.2%, 99.3%, 99.4%, 99.5%, 99.6%, 99.7%, 99.8%, 99.9% identical to any one of SEQ ID NOs: 11-18; or with a 16S rRNA sequence represented by any one of SEQ ID NOs: 11-18. In some embodiments, the bacterial strain comprises two or more copies of a 16S rRNA sequence in its genome (e.g., two copies, three copies, four copies, five copies, six copies, seven copies, eight copies). For example, the bacterial strain may comprise four copies of a 16S rRNA sequence in its genome (e.g., each of SEQ ID NOs: 11-14; or each of SEQ ID NOs: 15-18).

[0110] In some embodiments, the bacterial strain is the C. sana strain deposited under accession number V21/019213 or V21/019214, or a derivative thereof.

[0111] Preferably, the bacterial strain is at least partially isolated.

[0112] In some embodiments, the bacterial strain is formulated as a pharmaceutical composition, further comprising a pharmaceutically acceptable carrier, diluent or excipient. In some embodiments, the pharmaceutical composition is a dry composition. In some embodiments, the dry composition is selected from the group consisting of particles, granules, and powder. By way of an illustrative example the pharmaceutical composition may be lyophilized, spray dried, fluidized bed dried, vacuum dried, or a combination thereof.

[0113] In some embodiments, the pharmaceutical composition is formulated for oral administration.

[0114] In still yet other aspects, the present invention provides a method of treating an inflammatory or autoimmune disorder in a subject, the method comprising administering an effective amount of a bacterial strain of C. sana to the subject, to thereby treat or prevent the inflammatory or autoimmune disorder.

[0115] In some embodiments, the inflammatory or autoimmune disorder is selected from the group comprising an inflammatory bowel disease (such as Crohn's disease or ulcerative colitis); asthma (such as allergic asthma or neutrophilic asthma); fatty liver disease (such as non-alcoholic fatty liver disease (NAFLD)); ankylosing spondylitis; systemic lupus erythematosus (SLE); scleroderma; Sjogren's syndrome; and vasculitis. Preferably, the inflammatory or autoimmune disorder is an inflammatory bowel disease (IBD).

[0116] In some embodiments, the bacterial strain blocks or otherwise inhibits STAT3 signalling in at least a cell of the subject. Typically, the cell is an epithelial cell, endothelial cell, or an immune cell (e.g., a Th17 immune cell).

[0117] In some embodiments, the bacterial strain has a 16S rRNA sequence that is at least about 95%, 96%, 97%, 98%, 99%, 99.5%, 99.9% identical to the 16S rRNA sequence of a bacterial strain of the genus C. sana.

[0118] Alternatively, in some embodiments the bacterial strain has a 16S rRNA sequence that is at least about 95%, 96%, 97%, 98%, 99%, 99.5%, 99.9% identical to any one of SEQ ID NOs: 11-18; or with a 16S rRNA sequence represented by any one of SEQ ID NOs: 11-18. In some embodiments, the bacterial strain comprises two or more copies of a 16S rRNA sequence in its genome (e.g., two copies, three copies, four copies, five copies, six copies, seven copies, eight copies). For example, the bacterial strain may comprise four copies of a 16S rRNA sequence in its genome (e.g., each of SEQ ID NOs: 11-14; or each of SEQ ID NOs: 15-18).

[0119] Preferably, the bacterial strain is at least partially isolated.

[0120] In some embodiments, the bacterial strain is formulated as a pharmaceutical composition, together with a pharmaceutically acceptable carrier, diluent, and/or excipient. In some embodiments, the composition is a dry composition selected from the group consisting of particles, granules, and powder. For example, the composition may be lyophilized. Alternatively, the composition may be spray dried, fluidized bed dried, or vacuum dried.

[0121] In some embodiments, the composition is formulated for oral administration.

[0122] In one aspect, the present invention provides a composition comprising a bacterial strain of the genus C. sana for use in therapy.

[0123] In another aspect, the present invention provides a composition comprising a bacterial strain of C. sana, for use in therapy.

[0124] In yet another aspect, the present invention provides a composition comprising a bacterial strain of the genus C. sana, for use in the treatment or prevention of an inflammatory or autoimmune disorder.

[0125] In still yet another aspect, the present invention provides a composition comprising a bacterial strain of C. sana, for use in the treatment or prevention of an inflammatory or autoimmune disorder.

[0126] In some embodiments, the bacterial strain is the C. sana strain deposited under accession number V21/019213 or V21/019214, or a derivative thereof.

[0127] In some embodiments, the inflammatory or autoimmune disorder is selected from an inflammatory bowel disease (such as Crohn's disease or ulcerative colitis); asthma (such as allergic asthma or neutrophilic asthma); arthritis (such as rheumatoid arthritis, osteoarthritis, psoriatic arthritis, or juvenile idiopathic arthritis); fatty liver disease (such as nonalcoholic fatty liver disease (NAFLD)); ankylosing spondylitis; psoriasis; systemic lupus erythematosus (SLE); scleroderma; Sjogren's syndrome; and type 1 diabetes mellitus. In some preferred embodiments, the inflammatory or autoimmune disorder is an inflammatory bowel disease (IBD).

[0128] In one aspect, the present invention provides a composition for use in treating an inflammatory or autoimmune disorder, the composition comprising a bacterial strain of C. sana; and an anti-inflammatory agent.

[0129] In some embodiments, the anti-inflammatory agent is selected from the group comprising 5-aminosalicylates, corticosteroids, azathioprine, infliximab, and adalimumab.

[0130] In another aspect, the present invention provides a composition for use in treating an inflammatory or autoimmune disorder, the composition comprises a bacterial strain of C. sana; and a nutritional supplement. In embodiments of this type, the nutritional supplement improves engraftment of the bacterial stain.

[0131] In still yet another aspect, Accordingly, in one aspect the invention provides a cell of the Gemmiger formicilis strain deposited under accession number V21/011520, or a derivative thereof.

[0132] In some embodiments, the cell is at least partially isolated.

[0133] In another aspect, the invention provides a biologically pure culture of the Gemmiger formicilis strain deposited under accession number V21/011520, or a derivative thereof.

[0134] In another aspect, the present invention provides a composition comprising the cell or culture as described above and elsewhere herein.

[0135] In yet another aspect, the present invention provides a composition comprising a bacterial strain with a 16S rRNA sequence that is at least about 97.5%, 98%, 98.5% 99%, 99.1%, 99.2%, 99.3%, 99.4%, 99.5%, 99.6%, 99.7%, 99.8%, or 99.9%, identical to SEQ ID NO: 27 or one or more of SEQ ID NOs: 45-47; or with a 16S rRNA sequence represented by SEQ ID NO: 27 or one or more of SEQ ID NOs: 45-47. In some embodiments, the bacterial strain comprises two or more copies of a 16S rRNA sequence in its genome (e.g., two copies, three copies, four copies, five copies, six copies, seven copies, eight copies).

[0136] In some embodiments, the composition further comprises a pharmaceutically acceptable excipient, diluent, or carrier.

[0137] In yet another aspect, the present invention provides a pharmaceutical composition comprising a bacterial strain with a 16S rRNA sequence that is at least about 97%, 98%, 99%, 99.5%, 99.6%, 99.7%, 99.8%, or 99.9% identical to the 16S rRNA sequence of a bacterial strain of the Gemmiger formicilis, together with a pharmaceutically acceptable carrier, diluent, or excipient.

[0138] In a related aspect, the present invention provides a pharmaceutical composition comprising an effective amount of a bacterial strain that is a phylogenetic descendant of the most recent common ancestor (MRCA) of G. variabile and G. sp002306375, together with a pharmaceutically acceptable carrier, diluent, or excipient. Suitably, the MRCA is defined at node 23818 of the bac120 phylogenetic tree from the Genome Taxonomy Database (GTDB). In some embodiments, the phylogenetic tree is created by release 89 of the GTDB, however, any subsequent release is considered to give equally as appliable results. In some preferred embodiments of this type, the bacterial strain is of G. formicilis.

[0139] Typically, the bacterial strain is at least partially isolated.

[0140] In some embodiments, the bacterial strain is live. In some alternative embodiments, the bacterial strain is dead.

[0141] In some embodiments, the compositions further comprise a prebiotic.

[0142] In some embodiments, the composition is formulated in a dried form. Typically, the composition is dried using techniques selected from lyophilization, spray drying, fluidized bed drying, vacuum drying, or a combination thereof.

[0143] In some embodiments, the composition is formulated for oral administration.

[0144] In some embodiments, the bacterial strain produces an agent that attenuates or impairs signal transducer and activator of transcription 3 (STAT3) signalling in a cell.

[0145] In some embodiments of this type, the agent is a small molecule, peptide, or nucleotide. Typically, the agent is released by the bacterial strain.

[0146] In some embodiments, the agent binds specifically to any one of STAT3, JAK2, TYK2, or IL-23.

[0147] In some embodiments, the G. formicilis metabolizes one or more agents selected from the group comprising or consisting of starch, glucose, fructose, gluconate, lactose, trehalose, and lactaldehyde as a carbon source.

[0148] In another aspect, the present invention provides a method of restoring or improving gut barrier function in a subject, the method comprising administering to the subject a bacterial strain of the species G. formicilis, to thereby restore or improve gut barrier function.

[0149] In some preferred embodiments, restoring or improving gut barrier function is characterised by at least one of: (i) an increase in the quality and/or quantity of mucin; (ii) improvement in integrity of tight junction proteins; (iii) reduction in translocation of luminal contents into systemic circulation; or (iv) reduction of intestinal ulcers and/or intestinal wounds.

[0150] In some embodiments, the luminal contents includes lipopolysaccharide (LPS).

[0151] In some embodiments, the restoration or improvement in gut barrier function results in a reduction in systemic inflammation in the subject. In some embodiments of this type, the systemic inflammation is characterized by elevated levels of an inflammatory cytokine (e.g., IL-1β IL-8, IL-6, and TNF) in the subject as compared to the level of the inflammatory cytokine in a healthy subject.

[0152] In yet another aspect, the present invention provides a method of maintaining gut barrier function in a subject, the method comprising administering to the subject a bacterial strain of the species G. formicilis, to thereby maintain gut barrier function in the subject.

[0153] In yet another aspect, the present invention provides a method of reducing inflammation in a subject, the method comprising administering to the subject a bacterial strain of the strain G. formicilis, to thereby reduce inflammation in the subject.

[0154] In some embodiments, the inflammation is local to the gut environment, or systemic inflammation.

[0155] In another aspect, the present invention provides a method of inducing or enhancing mucosal healing in a subject, the method comprising administering to the subject a bacterial strain of the species G. formicilis in an amount sufficient to induce epithelial cell migration, proliferation and/or differentiation, to thereby induce mucosal healing in the subject.

[0156] In some embodiments, mucosal healing in the subject can be measured using one or more fecal or serum markers. By way of an illustrative example, one or more fecal markers may be selected from the group comprising calprotectin, lactoferrin, metalloproteinase (MMP)-9, and lipocalin-2.

[0157] In some embodiments, the bacterial strain reduces inflammation by attenuating the NFκB pathway. In some embodiments of this type, the bacterial strain inhibits the production of one or more transcription factors, cytokines, or chemokines selected from the group comprising NFκB, TNF, IFN-γ, IL-1β, IL-8, and MCP-1.

[0158] In yet another aspect, the present invention provides methods of blocking or otherwise inhibiting STAT3 signalling in a target cell, the method comprising contacting the cell with at least a soluble component of a bacterial cell preparation of the species G. formicilis, to block or otherwise inhibit STAT3 signalling in the cell. Typically, the method of this aspect is performed in vitro.

[0159] In some embodiments, the target cell is selected from a reporter cell (e.g., a HEK cell), an immune cell (e.g., a Th17 immune cell), an epithelial cell, or an endothelial cell. In some embodiments, the target cell is a mammalian cell, and preferably, a human cell.

[0160] In some embodiments, the bacterial cell preparation is a bacterial cell culture. The soluble component may therefore comprise, consist, or consist essentially of, the soluble fraction of the bacterial cell culture (e.g., the cell culture supernatant). The soluble component may further comprise some insoluble components of the bacterial cell culture. For example, the soluble component may include substantially all of the bacterial culture. Preferably, the soluble component is substantially depleted of bacterial cells.

[0161] In some alternative embodiments, the bacterial cell preparation is a bacterial cell lysate. In exemplary embodiments of this type, the soluble component may relate to the soluble fraction of the cell lysate. A soluble fraction can suitably be achieved by any method, including by centrifugation.

[0162] In still yet another aspect, the present invention provides a method of blocking or otherwise inhibiting STAT3 signalling in a cell, the method comprising administering a bacterial strain of the species G. formicilis to the subject, thereby blocking or otherwise inhibiting STAT3 signalling in the cell. Typically, the methods of this aspect are performed in vivo.

[0163] In some embodiments, the cell is an immune cell (e.g., a Th17 immune cell) or epithelial cell.

[0164] In some embodiments, the cell is an epithelial cell, and the bacterial strain or a metabolite produced by the bacterial strain increases the production of IL-22 in the subject.

[0165] In some embodiments, the bacterial strain produces a molecule that is a direct inhibitor or an indirect inhibitor of STAT3. For example, the bacterial strain may produce a metabolite that directly inhibits at least one of an IL-23 polypeptide, a JAK2 polypeptide, a TYK2 polypeptide, or a STAT3 polypeptide.

[0166] In some embodiments, the bacterial strains used in the methods described above and elsewhere herein produce one or more metabolites selected from butyrate, acetate, ethanol and fumarate.

[0167] In some embodiments the bacterial strain has a 16S rRNA sequence that is at least about 97.5%, 98.5%, 99%, 99.1%, 99.2%, 99.3%, 99.4%, 99.5%, 99.6%, 99.7%, 99.8%, 99.9% identical to the 16S rRNA sequence of a bacterial strain of G. formicilis.

[0168] In some alternative embodiments, the bacterial strain has a 16S rRNA sequence that is at least about 97.5%, 98.5%, 99%, 99.1%, 99.2%, 99.3%, 99.4%, 99.5%, 99.6%, 99.7%, 99.8%, 99.9% identical to SEQ ID NO: 27 or one or more of SEQ ID NOs: 45-47 or when the bacterial strain has the 16S rRNA gene sequence represented by SEQ ID NO: 27 or one or more of SEQ ID NOs: 45-47. In some embodiments, the bacterial strain comprises two or more copies (e.g., two copies, three copies, four copies, five copies, six copies, seven copies, eight copies) independently selected from the 16S rRNA sequences set forth in SEQ ID NO: 27 or one or more of SEQ ID NOs: 45-47.

[0169] In some embodiments, the bacterial strain is the G. formicilis strain deposited under accession number V21/011520, or a derivative thereof.

[0170] Preferably, the bacterial strain is at least partially isolated.

[0171] In some embodiments, the bacterial strain is formulated as a pharmaceutical composition, further comprising a pharmaceutically acceptable carrier, diluent or excipient. In some embodiments, the pharmaceutical composition is a dry composition. In some embodiments, the dry composition is selected from the group consisting of particles, granules, and powder. By way of an illustrative example the pharmaceutical composition may be lyophilized, spray dried, fluidized bed dried, vacuum dried, or a combination thereof.

[0172] In some embodiments, the pharmaceutical composition is formulated for oral administration.

[0173] In still yet another aspect, the present invention provides a method of blocking or otherwise inhibiting STAT3 signalling in a cell, the method comprising administering a bacterial strain of the species Gemmiger sp. MD158 to the subject, thereby blocking or otherwise inhibiting STAT3 signalling in the cell. Typically, the methods of this aspect are performed in vivo.

[0174] In still yet other aspects, the present invention provides a method of treating an inflammatory or autoimmune disorder in a subject, the method comprising administering an effective amount of a bacterial strain of G. formicilis to the subject, to thereby treat or prevent the inflammatory or autoimmune disorder.

[0175] In some embodiments, the inflammatory or autoimmune disorder is selected from the group comprising an inflammatory bowel disease (such as Crohn's disease or ulcerative colitis); asthma (such as allergic asthma or neutrophilic asthma); fatty liver disease (such as non-alcoholic fatty liver disease (NAFLD)); ankylosing spondylitis; systemic lupus erythematosus (SLE); scleroderma; Sjogren's syndrome; and vasculitis. Preferably, the inflammatory or autoimmune disorder is an inflammatory bowel disease (IBD).

[0176] In some embodiments, the bacterial strain blocks or otherwise inhibits STAT3 signalling in at least a cell of the subject. Typically, the cell is an epithelial cell, endothelial cell, or an immune cell (e.g., a Th17 immune cell).

[0177] In some embodiments, the bacterial strain has a 16S rRNA sequence that is at least about 95%, 96%, 97%, 98%, 99%, 99.5%, 99.9% identical to the 16S rRNA sequence of a bacterial strain of the genus Gemmiger.

[0178] Alternatively, in some embodiments the bacterial strain has a 16S rRNA sequence that is at least about 95%, 96%, 97%, 98%, 99%, 99.5%, 99.9% identical to SEQ ID NO: 27 or one or more of SEQ ID NOs: 45-47, or when the bacterial strain has the 16S rRNA gene sequence represented by SEQ ID NO: 27 or one or more of SEQ ID NOs: 45-47.

[0179] Preferably, the bacterial strain is at least partially isolated.

[0180] In some embodiments, the bacterial strain is formulated as a pharmaceutical composition, together with a pharmaceutically acceptable carrier, diluent, and/or excipient. In some embodiments, the composition is a dry composition selected from the group consisting of particles, granules, and powder. For example, the composition may be lyophilized. Alternatively, the composition may be spray dried, fluidized bed dried, or vacuum dried.

[0181] In some embodiments, the composition is formulated for oral administration.

[0182] In one aspect, the present invention provides a composition comprising a bacterial strain of the genus Gemmiger for use in therapy.

[0183] In another aspect, the present invention provides a composition comprising a bacterial strain of G. formicilis, for use in therapy.

[0184] In another aspect, the present invention provides a composition comprising a bacterial strain of Gemmiger sp. MD158, for use in therapy.

[0185] In yet another aspect, the present invention provides a composition comprising a bacterial strain of the genus Gemmiger, for use in the treatment or prevention of an inflammatory or autoimmune disorder.

[0186] In still yet another aspect, the present invention provides a composition comprising a bacterial strain of G. formicilis, for use in the treatment or prevention of an inflammatory or autoimmune disorder.

[0187] In some embodiments, the bacterial strain is the G. formicilis strain deposited under accession number V21/011520, or a derivative thereof.

[0188] In some embodiments, the bacterial strain is the Gemmiger sp. MD158 strain with a genome sequence that comprises a sequence set forth in at least one, two, three, four, or all of SEQ ID NOs: 34-38.

[0189] In some embodiments, the inflammatory or autoimmune disorder is selected from an inflammatory bowel disease (such as Crohn's disease or ulcerative colitis); asthma (such as allergic asthma or neutrophilic asthma); arthritis (such as rheumatoid arthritis, osteoarthritis, psoriatic arthritis, or juvenile idiopathic arthritis); fatty liver disease (such as nonalcoholic fatty liver disease (NAFLD)); ankylosing spondylitis; psoriasis; systemic lupus erythematosus (SLE); scleroderma; Sjogren's syndrome; and type 1 diabetes mellitus. In some preferred embodiments, the inflammatory or autoimmune disorder is an inflammatory bowel disease (IBD).

[0190] In one aspect, the present invention provides a composition for use in treating an inflammatory or autoimmune disorder, the composition comprising a bacterial strain of G. formicilis; and an anti-inflammatory agent.

[0191] In some embodiments, the anti-inflammatory agent is selected from the group comprising 5-aminosalicylates, corticosteroids, azathioprine, infliximab, and adalimumab.

[0192] In another aspect, the present invention provides a composition for use in treating an inflammatory or autoimmune disorder, the composition comprises a bacterial strain of a Gemmiger species; and a nutritional supplement. In embodiments of this type, the nutritional supplement improves engraftment of the bacterial stain. In some embodiments of this type, the bacterial strain of the the species G. formicilis. In some other embodiments, the bacterial strain is of the specifies Gemmiger sp. MD158.

[0193] In some related aspects, the technology described above and/or elsewhere herein provides bacterial species and compositions comprising them in for form of probiotics. Preferably, such probiotics are effective to improve intestinal microbial ecology, alleviate symptoms of microbial dysbiosis, promote wellness, and/or treat or prevent inflammatory and/or autoimmune disorders.

### BRIEF DESCRIPTION OF THE FIGURES

[0194] The following figures form part of the present specification and are included to further demonstrate certain aspects of the present disclosure. The disclosure may be better understood by reference to one or more of these figures in combination with the detailed description of specific embodiments presented herein.

[0195] FIG. 1 shows a GTDB species representative phylogenetic tree (r89; methods described in Parks et al. 2018), focusing on the phylogenetic neighbourhood of A. shahii. The most recent common ancestor node of the health-associated species A. shahii with a high stability (bootstrap value >90%) is highlighted.

[0196] FIG. 2 provides graphical representations of the association between bacteria of the Alistipes genus and representative inflammatory and/or autoimmune disorders. (A) Using high resolution gut metagenomic data of 6,020 subjects, we identified A. shahii, A. finegoldii, A. senegalensis, A. onderdonkii, and A. sp000434235 as being prevalent in healthy humans (dark bar) but depleted in Crohn's disease and ulcerative colitis (striped bars); (B) These observations were validated in an independent IBD cohort previously published by Harvard (Franzosa et al., 2019); (C) A. shahii; (D) A. finegoldii; and (E) A. senegalensis are significantly less prevalent in a range of inflammatory and autoimmune disorders (striped bars) (P<0.05, Fisher's exact test).

[0197] FIG. 3 provides graphical representation of the morphology and phylogeny of A. shahii strains. (A) Gram-staining of A. shahii MH21-1 isolate showing cell morphology. (B) A genome tree constructed with an alignment of 120 bacteria-specific single copy marker genes from high quality reference genomes (GTDB r89). Tips are labelled with the NCBI organism name and NCBI GenBank ID. Clades are labelled with GTDB r89 taxonomy. Non-parametric bootstrap values were calculated from 1000 iterations.

[0198] FIG. 4 provides graphical representations that A. shahii does not affect healthy gut function in naïve C57Bl/6 mice. (A) Overview of the model used to assess the effect of A. shahii MH21-1 on naïve C57Bl/6 mice. (B) Treatment with A. shahii MH21-1 has little effect on body weight of naïve animals. (C)-(D) Treatment with A. shahii MH21-1 has no effect on colon length or colon weight/length ratio relative to vehicle treated controls in naïve animals. (E)-(G) Treatment with A. shahii MH21-1 has no effect on epithelial injury, inflammation, hypervascularization relative to vehicle treated controls in naïve animals. (H) Treatment with A. shahii MH21-1 has no effect on gut histology relative to vehicle treated controls in naïve animals. All data reported as mean and standard deviation. ns, not significant.

[0199] FIG. 5 provides graphical representations that A. shahii restores gut barrier function. (A) Overview of the DSS model used to assess the therapeutic efficacy of A. shahii. (B) Effect of daily treatment of vehicle, prednisone and A. shahii on body weight of healthy and DSS treated mice. All treatment groups were compared to the DSS+vehicle group. Significance was determined using a two-way Anova with Tukey's test for multiple comparison. (C) Representative gut histology images of C57Bl/6 mice treated with vehicle, prednisone, or A. shahii. (D) DSS treatment results in an increase in the histopathological score that is ameliorated by treatment with prednisone, F. prausnitzii A2-165 and A. shahii. All data presented as mean and standard deviation. All groups were compared to the DSS+vehicle group and significance was determined using a one-way Anova with Dunnett's test for multiple comparison. (E) DSS treatment results in an increase in epithelial injury that is ameliorated by treatment with prednisone or A. shahii. All data presented as mean and standard deviation. All groups were compared to the DSS+vehicle group using a Kruskal-Wallis test with Dunn's correction for multiple comparisons. (F) DSS treatment results in a significant decrease in goblet cells that is ameliorated by treatment with prednisone or A. shahii. All data presented as mean and standard deviation. All groups were compared to the DSS+vehicle group using a Kruskal-Wallis test with Dunn's correction for multiple comparisons. (G) DSS treatment results in a significant decrease in intraepithelial lymphocytes that is ameliorated by treatment with A. shahii. All data presented as mean and standard deviation. All groups were compared to the DSS+vehicle group using a Kruskal-Wallis test with Dunn's correction for multiple comparisons. (H) Overview of the SKG model used to assess the therapeutic efficacy of A. shahii. (I) Curdlan treatment results in an increase in the histopathological score that is ameliorated by treatment with anti-IL-23 antibody and A. shahii. All data presented as mean and standard deviation. All groups were compared to the curdlan+vehicle group using an Anova with Dunnett's test for multiple comparisons. (J)-(M) Curdlan treatment results in an increase in IL-23, IL-12p70, IL-6 and GM-CSF that is ameliorated by treatment with A. shahii. All data presented as mean and standard deviation. For IL-23, IL-12p70 and GM-CSF, all groups were compared to the DSS+vehicle group using a Kruskal-Wallis test with Dunn's correction for multiple comparisons. For IL-6, all groups were compared to the curdlan+vehicle group using an Anova with Dunnett's test for multiple comparisons. For all data, ns: not significant; *, p<0.05; **, p<0.01; ***, p<0.001 ****, p<0.0001.

[0200] FIG. 6 provides a graphical representation of A. shahii suppressing STAT3 in vitro. (A)-(C) STAT3 signalling is inhibited when HEKBlue IL23 reporter cells are treated with cell-free supernatant raw or <3 KDa fractionated culture supernatant of A. shahii strain MH21-1 (t-test, n=9, **** p<0.0001; *** p=0.0004), A. shahii MH21-3 and A. shahii MH21-6. (D) A. shahii culture supernatant was size fractionated and heat treated at 37° C. or 97° C., then tested using the HEKBlue IL-23 reporter cell lines. After heat treatment, all fractions were able to suppress STAT3 signalling (t-test, n=9; **** p<0.0001; * p=0.0362; **** p<0.0001). (E) Cell-free supernatant from A. shahii MH21-1 grown in PYG exhibits potent STAT3 suppressive activity but no significant activity when grown in WCB or MCM (One-way ANOVA, n=9; ns p=0.4896, and 0.7489; **** p<0.0001 and <0.0001, ns p=0.3677 and 0.4524). (F) STAT3 signalling is inhibited when HEKBlue IL-6 reporter cells are treated with cell-free supernatant raw or <3 KDa fractionated culture supernatant of A. shahii strain MH21-2 and A. shahii strain MH21-3 (t-test, **** p<0.0001).

[0201] FIG. 7 provides a graphical representation showing that A. shahii promotes the migration of human gut epithelial cells. (A) Transwell migration assays were employed to study the effect of sterile culture supernatant extracts from A. shahii on the migration of HCT116 colon cancer cells. In serum-starved conditions (0.5% FBS), the addition of A. shahii 1×extract to the bottom of the chamber significantly increased the movement of HCT116 cells to the basolateral side compared to the TYG-M medium extract control. (TYG-M, Untreated n=6 technical replicates; A. shahii n=4 technical replicates, for 3 biological replicates each; Unpaired t-test, two-tailed P=0.0047). (B) As a second readout for cell migration, the Incucyte scratch wound assay was performed. The relative wound confluence was measured every two hours after the HCT116 cell monolayer was scratched. 90 hours post scratch, serum-starved HCT116 cells incubated in 0.6× extract from A. shahii MH21-1 showed significantly higher wound confluence, compared to cells treated with TYG-M medium extract. (TYG-M, Untreated n=16 technical replicates; A. shahii (n=16 technical replicates, for 3 biological replicates each); Unpaired t-test, two-tailed p=0.0069). (C) The TEER across T84 cell monolayers was assessed during and after 48-hour basolateral treatment with barrier disruptor IFN-γ. T84 cells treated apically with A. shahii cell free culture supernatant show faster recovery ameliorates after IFN-γ induced changes to loss of barrier integrity following 48 hours of treatment relative to the PYG medium control as indicated by higher TEER values (Ohms) as assessed by TEER (each condition n=4 replicates). (D) T84 cells treated apically with A. shahii cell free culture supernatant show significantly higher TEER ameliorates 7 days post IFN-γ induced changes to mediated loss of barrier integrity in TEER following 9 days of treatment relative to the PYG medium control as assessed by TEER (each condition n=4 replicates). Samples were compared and statistical significance was determined using an unpaired t-test. **** p<0.0001. (E) The TEER across T84 cell monolayers was assessed during and after 48-hour basolateral treatment with barrier disruptor IFN-γ. T84 cells treated apically with A. shahii cell free culture supernatant ameliorates show faster recovery from IFN-γ induced changes to loss of barrier integrity following 48 hours of treatment relative to the PYG medium control as assessed by TEER. All samples were normalized to untreated cells and presented is the percentage difference in TEER compared to the control. (F) T84 cells treated apically with A. shahii cell free culture supernatant show significantly higher TEER ameliorates7 days after IFN-γ induced changes to barrier integrity in TEER following 9 days of treatment relative to the PYG medium control as assessed by TEER. All samples were normalized to untreated cells. Samples were compared using an unpaired t-test. **** p<0.0001. (G) Overview of the gating strategy used to isolate A. shahii MH21-6.

[0202] FIG. 8 provides graphical representation that Colonithrix species are significantly less prevalent in the gut microbiome of humans with inflammatory and autoimmune diseases compared to healthy control. Using high resolution gut metagenomic data of 6,020 subjects.

[0203] FIG. 9 provides graphical representation of the phylogeny and morphology of C. sana strains. (A) Gram-staining of a C. sana isolate showing morphology. (B) A genome tree constructed with an alignment of 120 bacteria-specific single copy marker genes from high quality reference genomes (GTDB r89; methods described in Parks et al., 2018). Tips are labelled with the NCBI organism name and NCBI GenBank ID. Clades are labelled with GTDB r89 taxonomy. Non-parametric bootstrap values were calculated from 1000 iterations. The tree focuses on the phylogenetic neighbourhood of the C. sana genus (i.e., around node 23879). Ancestor nodes with high stability (bootstrap value >90%) of the health-associated species C. sana up to the most recent common ancestor of the Colonithrix genus are labelled.

[0204] FIG. 10 provides graphical representations that C. sana restores gut barrier function. (A) Overview of the DSS model used to assess the therapeutic efficacy of Colonithrix species. (B) DSS treatment results in an increase in the histopathological score that is ameliorated by treatment with C. sana MH35-1 and C. sana MH35-2. All data presented as mean and standard deviation. All groups were compared to the DSS+vehicle group and significance was determined using an unpaired t-test with Welch's correction. (C) DSS treatment results in an increase in epithelial injury that is ameliorated by treatment with C. sana MH35-1 and C. sana MH35-2. All data presented as mean and standard deviation. All groups were compared to the DSS+vehicle group using a Kruskal-Wallis. For all data, ns: not significant; *, p<0.05.

[0205] FIG. 11 provides a graphical representation of C. sana suppressing STAT3 activation in vitro. STAT3 signalling is inhibited when HEKBlue IL23 reporter cell lines are treated with cell-free supernatant raw or <3 KDa filtered of (A) C. sana MH35-1 and (B) C. sana MH35-2 (t-test, n=9, A **** p<0.0001;B **** p<0.0001).

[0206] FIG. 12 provides a graphical representation of C. sana suppressing IL-6 mediated STAT3 activation in vitro. (A-B) STAT3 signalling is inhibited when HEKBlue IL-6 reporter cells are treated with cell-free supernatant raw or <3 KDa fractionated culture supernatant of C. sana MH35-1 (A) and C. sana MH35-2 (B) at 10% v/v (unpaired t-test, n=18, **** p<0.0001). (C) STAT3 signalling is inhibited when HEKBlue IL-6 reporter cells are treated with 1× extract of C. sana MH35-1 and C. sana MH35-2 (unpaired t-test, n=24, **** p<0.0001).

[0207] FIG. 13 provides a graphical representation showing that C. sana promotes the migration of human gut epithelial cells. (A) Transwell migration assays were employed to study the effect of sterile culture supernatant extracts from C. sana MH35-1 and C. sana MH35-2 on the migration of HCT116 colon cancer cells. In serum-starved conditions (0.5% FBS), untreated HCT116 cells and cells treated with 0.5× bacterial medium extract showed comparable background level of migration to the basolateral side of the Transwell chamber. The addition of 0.5×C. sana MH35-1 and C. sana MH35-2 extract to the bottom of the chamber significantly increased the movement of HCT116 cells to the basolateral side compared to the medium control (Untreated n=6 technical replicates; Medium control n=6 technical replicates; C. sana MH35-1 n=4 technical replicates, for 2 biological replicates each; C. sana MH35-2 n=4 technical replicates, for 3 biological replicates each; Unpaired t-test, two tailed *** P=0.0003 for C. sana MH35-1 and *** P=0.0009 for C. sana MH35-2 (B) As a second readout for cell migration, the Incucyte scratch wound assay was performed. The relative wound confluence was measured every two hours after the HCT116 cell monolayer was scratched. Untreated n=18 technical replicates; Medium control n=18 technical replicates; C. sana MH35-1 n=36 technical replicates, for 2 biological replicates; C. sana MH35-2 n=36 technical replicates, for 3 biological replicates. (C) 24 hours post scratch, serum-starved HCT116 cells incubated in 0.5× extract from C. sana MH35-1 and C. sana MH35-2 showed significantly higher wound confluence, compared to cells treated with bacterial medium extract. Unpaired t-test *** P=0.0008 for C. sana MH35-1 and *** P=0.0004 for C. sana MH35-2.

[0208] FIG. 14 provides graphical representation that Gemmiger species are significantly less prevalent in the gut microbiome of humans with inflammatory and autoimmune diseases compared to healthy control. Using high resolution gut metagenomic data of 6,020 subjects, we identified (A) Gemmiger formicilis; (B) Gemmiger species_C; (C) Gemmiger species_A; and (D) Gemmiger sp003476825 as being prevalent in healthy humans (dark bar) but depleted in a range of inflammatory and autoimmune disorders (striped bars). (E) The strongest effect was observed for IBD, including both major subtypes ulcerative colitis and Crohn's disease. (F) These observations were validated in an independent IBD cohort previously published by Harvard. All shown association have a P<0.05 (Fisher's exact test).

[0209] FIG. 15 provides graphical representation of the phylogeny and morphology of G. formicilis strains. (A) Gram-staining of G. formicilis MH32-1 isolate showing morphology. (B) Top panel, photograph of G. formicilis MH32-2 on plate, showing round entire raised colonies after 48 hours on TY medium. Lower panel, gram-staining of G. formicilis MH32-2 isolate showing morphology. (C) A genome tree constructed with an alignment of 120 bacteria-specific single copy marker genes from high quality reference genomes (GTDB r89). Tips are labelled with the NCBI organism name and NCBI GenBank ID. Clades are labelled with GTDB r89 taxonomy. Non-parametric bootstrap values were calculated from 1000 iterations. (D) GTDB species representative tree (r89; methods described in Parks et al., 2018), focusing on the phylogenetic neighbourhood of the Gemmiger genus (i.e., around node 23818). Ancestor nodes with high stability (bootstrap value >90%) of the health-associated species G. variabile up to the most recent common ancestor of the Gemmiger genus are labelled.

[0210] FIG. 16 provides graphical representations that G. formicilis does not affect healthy gut function in naïve C57Bl/6 mice. (A) Overview of the model used to assess the effect of G. formicilis MH32-1 on naïve C57Bl/6 mice. (B) Treatment with MH32-1 has little effect on body weight of naïve animals. (C)-(D) Treatment with MH32-1 has no effect on colon length or colon weight/length ratio relative to vehicle treated controls in naïve animals. (E)-(F) Treatment with G. formicilis MH32-1 has no effect on epithelial injury or hypervascularization relative to vehicle treated controls in naïve animals. (G) Treatment with G. formicilis MH32-1 has no effect on gut histology relative to vehicle treated controls in naïve animals. All data reported as mean and standard deviation. ns, not significant; * p<0.05.

[0211] FIG. 17 provides graphical representations that G. formicilis restores gut barrier function. (A) Overview of the DSS model used to assess the therapeutic efficacy of G. formicilis MH32-1. (B) Effect of daily treatment of vehicle, prednisone and G. formicilis MH32-1 in healthy and DSS treated mice. All treatment groups were compared to the DSS+vehicle group. Significance was determined using a two-way Anova with Tukey's test for multiple comparison. (C) Endoscopic assessment of colitis as assessed on days 1, 2 and 6. All groups were compared to the DSS+vehicle group for each individual day using a Kruskal-Wallis test with Dunn's correction for multiple comparisons (day 1) or one-way Anova with Dunnett's correction for multiple comparison (day 2, 6) as appropriate. All data presented as mean and standard deviation. (D) DSS treatment results in a reduction in colon length that is ameliorated by F. prausnitzii A2-165 and G. formicilis MH32-1, but not prednisone. All data presented as mean and standard deviation. All groups were compared to the DSS+vehicle group and significance was determined using a one-way Anova with Dunnett's test for multiple comparison. (E) Representative gut histology images of C57Bl/6 mice treated with vehicle, prednisone, or G. formicilis MH32-1. (F) DSS treatment results in an increase in the histopathological score that is ameliorated by treatment with prednisone, F. prausnitzii A2-165 and G. formicilis MH32-1. All data presented as mean and standard deviation. All groups were compared to the DSS+vehicle group and significance was determined using a one-way Anova with Dunnett's test for multiple comparison. (G) DSS treatment results in an increase in epithelial injury that is ameliorated by treatment with prednisone or G. formicilis MH32-1. All data presented as mean and standard deviation. All groups were compared to the DSS+vehicle group using a Kruskal-Wallis test with Dunn's correction for multiple comparisons. (H) Lipocalin-2 concentration in faeces of C57Bl/6 mice treated with vehicle, prednisone, F. prausnitzii or G. formicilis MH32-1. Significance was determined using a one-way Anova with Dunnett's test for multiple comparison. (I) Overview of the SKG model used to assess the therapeutic efficacy of G. formicilis MH32-1. (J) Curdlan treatment results in an increase in the histopathological score that is ameliorated by treatment with anti-IL-23 antibody and G. formicilis MH32-1. All data presented as mean and standard deviation. All groups were compared to the curdlan+vehicle group using an Anova with Dunnett's test for multiple comparisons. For all data, ns: not significant; *, p<0.05; **, p<0.01; ****, p<0.0001.

[0212] FIG. 18 provides a graphical representation of G. formicilis suppressing STAT3 activation in vitro. (A) STAT3 signalling is inhibited when HEKBlue IL23 reporter cell lines are treated with cell-free supernatant raw or <3 KDa filtered of G. formicilis MH32-1 (t-test, n=9, p<0.0001, p=0.0001). (B) Cell-free supernatant of G. formicilis MH32-1 was size fractionated and heat treated at 37° C. or 97° C., then tested HEKBlue IL-23 reporter cell lines. After heat treatment, all fractions are still able to inhibit STAT3 signalling (t-test, n=9; p=0.0421, p<0.0001, p=0.0009). (C) Cell-free supernatant of G. formicilis MH32-1 was size fractionated and treated with Proteinase K at 37° C. for 30 minutes, then tested HEKBlue IL-23 reporter cell lines. After Proteinase K treatment, all fractions are still able to inhibit STAT3 signalling (t-test, n=9; p<0.0001, p<0.0001). (D) Cell-free supernatant from MH32-1 grown in TY exhibits potent STAT3 suppressive activity but minimal activity when grown in PYG, WCB and MCM (t-test, n=9; p<0.0001, p=0.0027, p=0.0203, p=0.0114). (E-F) STAT3 signalling is inhibited when HEKBlue IL23 reporter cell lines are treated with cell-free supernatant raw or <3 KDa filtered of G. formicilis MH32-2 and G. formicilis ATCC 27749 (t-test, n=9, p<0.0001, p=0.0001). (G) STAT3 signalling is inhibited when HEKBlue IL23 reporter cell lines are treated with cell-free supernatant raw or <3 KDa filtered of Gemmiger sp. MD158 (Samples were compared using an unpaired t-test. ***, p<0.001; ****, p<0.0001). (H) PBMCs show decreased secretion of IL-6 when pre-treated with cell-free supernatant of G. formicilis MH32-1 and then stimulated with PIM relative to the TY medium control. Normally distributed data was analysed using an ordinary one-way Anova with Sidak's multiple comparison test (n=7 per treatment, ns=not significant; *=p<0.05; ***=p<0.001; ****=p<0.0001). All data presented as mean and standard deviation. (I) G. formicilis MH32-1 significantly suppresses IL-6 secretion from LPS-stimulated T84 gut epithelial cells compared to the TY medium control. The suppressive activity is also retained in the <3 kDa fraction of the G. formicilis culture supernatant. All data presented as mean and standard deviation. T test **** p<0.0001. (J) STAT3 signalling is inhibited when HEKBlue IL-6 reporter cell lines are treated with <3 KDa filtered cell-free supernatant of G. formicilis MH32-1 (t-test, n=9; *** p=0.0009).

[0213] FIG. 19 provides a graphical representation showing that G. formicilis promotes the migration of human gut epithelial cells. (A) Transwell migration assays were employed to study the effect of sterile culture supernatant extracts from G. formicilis MH32-1 on the migration of HCT116 colon cancer cells. In serum-starved conditions (0.5% FBS), untreated HCT116 cells and cells treated with TY medium extract showed comparable background level of migration to the basolateral side of the Transwell chamber. The addition of G. formicilis MH32-1 extract to the bottom of the chamber significantly increased the movement of HCT116 cells to the basolateral side compared to the TY control (TY, C n=6 technical replicates; MH32-1 n=4 technical replicates, for 3 biological replicates each; Dunnett's multiple comparisons test **** P<0.0001). (B) Representative brightfield images at 10× magnification for Transwell® migration experiments. Image size is 570 μm×570 μm. (C) As a second readout for cell migration, the Incucyte scratch wound assay was performed. The relative wound confluence was measured every two hours after the HCT116 cell monolayer was scratched. TY, C n=27 technical replicates; G. formicilis MH32-1 n=18 technical replicates, for 3 biological replicates each. (D) 18 hours post scratch, serum-starved HCT116 cells incubated in 0.3× extract from G. formicilis MH32-1 showed significantly higher wound confluence, compared to cells treated with TY medium extract. TY, C n=27 technical replicates; G. formicilis MH32-1 n=18 technical replicates, for 3 biological replicates each; Unpaired t-test ** p<0.0028.

[0214] FIG. 20 provides a graphical representation showing that G. formicilis restores gut barrier integrity. Effect of treatment with G. formicilis MH32-1 and vehicle control on T84 cells stimulated with IFN-γ as assessed through transepithelial electrical resistance (TEER) using the Maestro Pro system. T84 cells were grown as monolayers in 96-well CytoView-Z plates and stimulated with IFNg (100 ng/mL) once stable TEER values were established. After 72 hours, cells were washed and media replaced with fresh media alone or supplemented with 1×G. formicilis MH32-1 extract or vehicle control. At 45 hours post-treatment TEER measurements were recorded, and the percentage difference in TEER value compared to the control (untreated T84 cells) was visualised in histograms as mean f SD. Statistical significance was determined by unpaired t-test; ** p<0.01; **** p<0.0001. (B) Overview of the gating strategy used to isolate Gemmiger sp. MD158.

BRIEF DESCRIPTION OF THE SEQUENCES

| SEQ | |
|---|---|
| ID | |
| NO: | Sequence Description |
| 1 | 16S rRNA sequence of A. shahii strain MH21-1 |
| 2 | 16S rRNA sequence of A. shahii strain MH21-2 |
| 3 | 16S rRNA sequence of A. shahii strain MH21-3 |
| 4 | Genome sequence of A. shahii strain MH21-1 |
| 5 | Genome sequence of A. shahii strain MH21-2 |
| 6 | Genome sequence of A. shahii strain MH21-3 |
| 7 | 16S rRNA sequence of A. finegoldiii type strain AHN 2437 |
| 8 | 16S rRNA sequence of A. onderdonkii type strain WAL 8169 |
| 9 | Genome sequence of A. finegoldii type strain AHN 2437 |
| 10 | Genome sequence of A. onderdonkii type strain WAL 8169 |
| 11 | 16S rRNA sequence copy 1 of C. sana strain MH35-1 |
| 12 | 16S rRNA sequence copy 2 of C. sana strain MH35-1 |
| 13 | 16S rRNA sequence copy 3 of C. sana strain MH35-1 |
| 14 | 16S rRNA sequence copy 4 of C. sana strain MH35-1 |
| 15 | 16S rRNA sequence copy 1 of C. sana strain MH35-2 |
| 16 | 16S rRNA sequence copy 2 of C. sana strain MH35-2 |
| 17 | 16S rRNA sequence copy 3 of C. sana strain MH35-2 |
| 18 | 16S rRNA sequence copy 4 of C. sana strain MH35-2 |
| 19 | Genome sequence of C. sana strain MH35-1 scaffold 1 |
| 20 | Genome sequence of C. sana strain MH35-1 scaffold 2 |
| 21 | Genome sequence of C. sana strain MH35-1 scaffold 3 |
| 22 | Genome sequence of C. sana strain MH35-1 scaffold 4 |
| 23 | Genome sequence of C. sana strain MH35-2 scaffold 1 |
| 24 | Genome sequence of C. sana strain MH35-2 scaffold 2 |
| 25 | Genome sequence of C. sana strain MH35-2 scaffold 3 |
| 26 | Genome sequence of C. sana strain MH35-2 scaffold 3 |
| 27 | 16S rRNA sequence of G. formicilis strain MH32-1 |
| 28 | Genome sequence of G. formicilis strain MH32-1 |
| 29 | Genome sequence of G. formicilis strain MH32-2 scaffold 1 |
| 30 | Genome sequence of G. formicilis strain MH32-2 scaffold 2 |
| 31 | Genome sequence of G. formicilis strain MH32-2 scaffold 3 |
| 32 | Genome sequence of G. formicilis strain MH32-2 scaffold 4 |
| 33 | Genome sequence of G. formicilis strain MH32-2 scaffold 5 |
| 34 | Genome sequence of Gemmiger sp. MD158 scaffold 1 |
| 35 | Genome sequence of Gemmiger sp. MD158 scaffold 2 |
| 36 | Genome sequence of Gemmiger sp. MD158 scaffold 3 |
| 37 | Genome sequence of Gemmiger sp. MD158 scaffold 4 |
| 38 | Genome sequence of Gemmiger sp. MD158 scaffold 5 |
| 39 | Genome sequence of A. shahii strain MH21-6 scaffold 1 |
| 40 | Genome sequence of A. shahii strain MH21-6 scaffold 2 |
| 41 | Genome sequence of A. shahii strain MH21-6 scaffold 3 |
| 42 | Genome sequence of A. shahii strain MH21-6 scaffold 4 |
| 43 | Genome sequence of A. shahii strain MH21-6 scaffold 5 |
| 44 | 16S rRNA sequence of A. shahii strain MH21-6 |
| 45 | 16S rRNA sequence of G. formicilis strain MH32-2 |
| 46 | 16S rRNA sequence of Gemmiger sp. MD158 strain |

### DETAILED DESCRIPTION OF THE INVENTION

### 1. Definitions

[0215] Unless defined otherwise, all technical and scientific terms used herein have the same meaning as commonly understood by those of ordinary skill in the art to which the invention belongs. Although any methods and materials similar or equivalent to those described herein can be used in the practice or testing of the present invention, preferred methods and materials are described. For the purposes of the present invention, the following terms are defined below.

[0216] The articles “a” and “an” are used herein to refer to one or to more than one (i.e., to at least one) of the grammatical object of the article. By way of example, “an element” means one element or more than one element.

[0217] The term “about” as used herein refers to the usual error range for the respective value readily known to the skilled person in this technical field. Reference to “about” a value or parameter herein includes (and describes) embodiments that are directed to that value or parameter per se.

[0218] As used herein, the term “administering,” refers to the placement of an agent (e.g., bacteria) as disclosed herein into a subject by a method or route which results in at least partial delivery of the agent at the desired site. Compositions comprising the compounds disclosed herein can be administered by any appropriate route which results in an effective biological activity or therapeutic effect in the subject. In some embodiments, administration comprises physical human activity (e.g., an injection, act of ingestion, an act of application, and/or manipulation of a delivery device or machine). Such activity can be performed (e.g., by a medical professional and/or the subject being treated).

[0219] Specifically, as used herein “administer” and “administration” encompasses embodiments in which one person directs another to consume live bacteria, dead bacteria, spent mediums derived from bacteria, cell pellets of bacteria, purified metabolites produced by bacteria, purified proteins produced by bacteria, prebiotics, small molecules, or combinations thereof in a certain manner and/or for a certain purpose independently of or in variance to any instructions received from a second person. Non-limiting examples of embodiments include the situation in which one person directs another to consume live bacteria, dead bacteria, spent mediums derived from bacteria, cell pellets of bacteria, purified metabolites produced by bacteria, purified proteins produced by bacteria, prebiotics, small molecules, or combinations thereof in a certain manner and/or for a certain purpose include when a physician prescribes a course of conduct and/or treatment to a patient, when a parent commands a minor user (such as a child) to consume such a product, when a trainer advises a user (such as an athlete) to follow a particular course of conduct and/or treatment, or when a manufacturer, distributer, or marketer recommends conditions of use to an end user, for example through advertisements or labeling on packing or on other materials provided in association with the sale or marketing of a product. In some embodiments, the disclosed compositions can be administered orally, intravenously, intramuscularly, intrathecally, subcutaneously, sublingually, buccally, rectally, vaginally, by the ocular route, by the optic route, nasally, via inhalation, by nebulization, cutaneously, transdermally, or combinations thereof, and formulated for delivery with a pharmaceutically acceptable excipient, carrier or diluent. Of note, although the disclosed compositions encompass multiple formulations and modes of delivery for treatments to ameliorate dysbiosis and its sequelae, it should be noted that live biotherapeutic products such as probiotics are not typically administered intravenously, intramuscularly, or intraperitoneally. These modes of delivery would likely be reserved for small-molecule products of bacterial metabolism.

[0220] The terms “administration concurrently” or “administering concurrently” or “co-administering” and the like refer to the administration of a single composition containing two or more actives, or the administration of each active as separate compositions and/or delivered by separate routes either contemporaneously or simultaneously or sequentially within a short enough period of time that the effective result is equivalent to that obtained when all such actives are administered as a single composition. By “simultaneously” is meant that the active agents are administered at substantially the same time, and desirably together in the same formulation. By “contemporaneously” it is meant that the active agents are administered closely in time, e.g., one agent is administered within from about one minute to within about one day before or after another. Any contemporaneous time is useful. However, it will often be the case that when not administered simultaneously, the agents will be administered within about one minute to within about eight hours and suitably within less than about one to about four hours. When administered contemporaneously, the agents are suitably administered at the same site on the subject. The term “same site” includes the exact location, but can be within about 0.5 to about 15 centimeters, preferably from within about 0.5 to about 5 centimeters. The term “separately” as used herein means that the agents are administered at an interval, for example at an interval of about a day to several weeks or months. The active agents may be administered in either order. The term “sequentially” as used herein means that the agents are administered in sequence, for example at an interval or intervals of minutes, hours, days or weeks. If appropriate the active agents may be administered in a regular repeating cycle.

[0221] The term “agent” includes a compound that induces a desired pharmacological and/or physiological effect. The term also encompasses pharmaceutically acceptable and pharmacologically active ingredients of those compounds specifically mentioned herein including but not limited to salts, esters, amides, prodrugs, active metabolites, analogs and the like. When the above term is used, then it is to be understood that this includes the active agent per se as well as pharmaceutically acceptable, pharmacologically active salts, esters, amides, prodrugs, metabolites, analogs, etc. The term “agent” is not to be construed narrowly but extends to small molecules, proteinaceous molecules such as peptides, polypeptides and proteins as well as compositions comprising them and genetic molecules such as RNA, DNA and mimetics and chemical analogs thereof as well as cellular agents. The term “agent” includes a cell that is capable of producing and secreting a polypeptide referred to herein as well as a polynucleotide comprising a nucleotide sequence that encodes that polypeptide. Thus, the term “agent” extends to nucleic acid constructs including vectors such as viral or non-viral vectors, expression vectors and plasmids for expression in and secretion in a range of cells.

[0222] The “amount” or “level” of a biomarker is a detectable level in a sample. These can be measured by methods known to one skilled in the art and also disclosed herein. The expression level or amount of biomarker assessed can be used to determine the response to treatment.

[0223] As used herein, “and/or” refers to and encompasses any and all possible combinations of one or more of the associated listed items, as well as the lack of combinations when interpreted in the alternative (or).

[0224] The term “anaerobic” means not requiring oxygen for growth. Anaerobic bacterial strains comprise bacterial strains that are obligate anaerobes (i.e., those that are harmed by the presence of oxygen); aerotolerant anaerobes, (i.e., those that cannot use oxygen for growth, but tolerate its presence); and facultative anaerobes (i.e., those that can grow without oxygen, but can use oxygen if it is present).

[0225] “Anaerobic conditions” are defined as conditions under which the oxygen concentration in the fermentation medium is too low for the microorganism to use as a terminal electron acceptor. “Anaerobic conditions” can be further defined as conditions under which no or small amounts of oxygen are added to the medium at rates of <3 mmol/L/h, preferably <2.5 mmol/L/h, more preferably <2 mmol/L/h, and most preferably <1.5 mmol/L/h. “Anaerobic conditions” means in particular completely oxygen-free (=0 mmol/L/h oxygen) or with small amounts of oxygen added to the medium at rates of e.g., <0.5 to <1 mmol/L/h. “Anaerobic metabolism” refers to a biochemical process in which oxygen is not the final acceptor of electrons contained in NADH. Anaerobic metabolism can be divided into anaerobic respiration, in which compounds other than oxygen serve as the terminal electron acceptor, and substrate level phosphorylation, in which the electrons from NADH are utilized to generate a reduced product via a fermentative pathway.

[0226] The term “carbon source” generally refers to a substrate or compound suitable for sustaining microorganism growth. Carbon sources may be in various forms, including, but not limited to polymers, carbohydrates, alcohols, acids, aldehydes, ketones, amino acids, peptides, etc. For example, these may include monosaccharides (such as glucose, fructose, xylose), oligosaccharides (i.e., sucrose, lactose), polysaccharides (i.e., starch, cellulose, hemicellulose), lignocellulosic materials, fatty acids (i.e., succinate, lactate, acetate), glycerol, etc. or a mixture thereof. The carbon source may be a product of photosynthesis, such as glucose or cellulose.

[0227] Monosaccharides used as carbon sources may be the product of hydrolysis of polysaccharides, such as acid or enzymatic hydrolysates of cellulose, starch and pectin. The term “energy source” may be used here interchangeably with carbon source since in chemoorganotrophic metabolism the carbon source is used both as an electron donor during catabolism and as a carbon source during cell growth.

[0228] Throughout this specification, unless the context requires otherwise, the words “comprise”, “comprises” and “comprising” will be understood to imply the inclusion of a stated step or element or group of steps or elements but not the exclusion of any other step or element or group of steps or elements. Thus, use of the term “comprising” and the like indicates that the listed elements are required or mandatory, but that other elements are optional and may or may not be present. By “consisting of” is meant including, and limited to, whatever follows the phrase “consisting of”. Thus, the phrase “consisting of” indicates that the listed elements are required or mandatory, and that no other elements may be present. By “consisting essentially of” is meant including any elements listed after the phrase, and limited to other elements that do not interfere with or contribute to the activity or action specified in the disclosure for the listed elements. Thus, the phrase “consisting essentially of” indicates that the listed elements are required or mandatory, but that other elements are optional and may or may not be present depending upon whether or not they affect the activity or action of the listed elements.

[0229] As used herein, “culturing”, “culture” and the like refer to the set of procedures used in vitro where a population of cells (or a single cell) is incubated under conditions which have been shown to support the growth or maintenance of the cells in vitro. The art recognizes a wide number of formats, media, temperature ranges, gas concentrations etc. which need to be defined in a culture system. The parameters will vary based on the format selected and the specific needs of the individual who practices the methods herein disclosed. However, it is recognized that the determination of culture parameters is routine in nature.

[0230] The terms “decrease”, “reduced”, “reduction”, “inhibit”, “suppress”, “attenuate” and the like are all used herein to mean a decrease by a statistically significant amount. In some embodiments, these terms typically mean a decrease by at least 10% as compared to a reference level (e.g., the absence of a given treatment or agent) and can include, for example, a decrease by at least about 10%, at least about 20%, at least about 25%, at least about 30%, at least about 35%, at least about 40%, at least about 45%, at least about 50%, at least about 55%, at least about 60%, at least about 65%, at least about 70%, at least about 75%, at least about 80%, at least about 85%, at least about 90%, at least about 95%, at least about 98%, at least about 99%, or more. As used herein “reduction”, “suppression”, and “inhibition” does not necessitate a complete inhibition or reduction as compared to a reference level. “Complete inhibition” and the like is a 100% inhibition as compared to a reference level. A decrease can be preferably down to a level accepted as within the range of normal (e.g., for an individual without a given disorder).

[0231] The terms “increased”, “increase”, enhance”, or “activate” are all used herein to mean an increase by a statistically significant amount. In some embodiments, the terms “increased”, “increase”, “enhance”, or “activate” can mean an increase of at least 10% as compared to a reference level (e.g., the absence of a given treatment or agent) and can include, for example, of at least about 10% as compared to a reference level, for example an increase of at least about 20%, at least about 25%, at least about 30%, at least about 35%, at least about 40%, at least about 45%, at least about 50%, at least about 55%, at least about 60%, at least about 65%, at least about 70%, at least about 75%, at least about 80%, at least about 85%, at least about 90%, at least about 95%, at least about 98%, at least about 99%, or up to and including a 100% increase or any increase between 10-100% as compared to a reference level or at least about a 2-fold, or at least about a 3-fold, or at least about a 3-fold, or at least about a 4-fold, or at least about a 5-fold, or at least about a 10-fold increase, or any increase between 2-fold and 10-fold or greater as compared to a reference level. In the context of a marker or symptom, an “increase” is a statistically significant increase in such level.

[0232] As used herein, the term “isolated” encompasses a bacterium or other entity or substance that has been (1) separated from at least some of the components with which it was associated when initially produced (whether in nature, such as human stool, or in an experimental setting, such as a Petri plate consisting of artificial growth medium), and/or (2) produced, prepared, purified, and/or manufactured by the hand of man. Isolated bacterial, proteins, metabolites, or combinations thereof may be separated from at least about 10%, about 20%, about 30%, about 40%, about 50%, about 60%, about 70%, about 80%, about 90%, or more of the other components with which they were initially associated. In some embodiments, isolated bacteria, proteins, metabolites, or combinations thereof are more than about 80%, about 85%, about 90%, about 91%, about 92%, about 93%, about 94%, about 95%, about 96%, about 97%, about 98%, about 99% or more than about 99% pure. As used herein, a substance is “pure” if it is substantially free of other components (such as other bacterial species). The terms “purify”, “purifying”, and “purified” refer to a bacterium or other material that has been separated from at least some of the components with which it was associated either when initially produced or generated (e.g., when in nature or in an experimental setting), or during any time after its initial production, as recognized by those skilled in the art of bacterial cultivation or of relevant skill (e.g., chemistry). A bacterium or bacterial population can be considered purified if it is isolated at or after production, such as from a material or environment containing the bacterial or bacterial population, and a purified bacterium or bacterial population can contain other material up to about 10%, about 20%, about 30%, about 40%, about 50%, about 60%, about 70%, about 80%, about 90% or above about 90% and still be considered “isolated”. In some embodiments, purified bacterial and bacterial populations are more than about 80%, about 85%, about 90%, about 91%, about 92%, about 93%, about 94%, about 95%, about 96%, about 97%, about 98%, about 99% or more than about 99% pure. In the instance of bacterial compositions provided herein, the one or more bacterial types present in the composition can be independently purified from one or more other bacteria produced and/or present in the material or environment containing the bacterial type. In some embodiments, a bacterium or population of bacteria is “isolated” if it comprises a single strain of bacteria. In some embodiments, such isolated bacteria can be admixed or administered with other isolated bacteria (e.g., in a defined consortium of isolated bacteria). Bacterial compositions and the bacterial components thereof are generally purified from residual habitat products.

[0233] The term “genome” as used herein includes the DNA comprising the genes (the coding nucleic acid sequences) and the noncoding nucleic acid sequences of a microorganism, and therefore includes introduction of the nucleic acid into, for example, the coding and noncoding DNA of the microorganism.

[0234] The term “Gram-variable” means giving a positive result and/or negative result in the Gram strain test (i.e., retaining the colour of the crystal violet staining reagent). Retention of crystal violet staining by a bacterium is linked to the thickness of the peptidoglycan layer in the bacterial cell wall. Gram-positive bacteria have a thicker peptidoglycan layer. Gram-staining is commonly used to help classify bacterial strains in the field of microbiology.

[0235] As used herein, the term “gut” is understood to refer to the human gastrointestinal tract, also known as the alimentary canal. The gut includes the mouth, pharynx, oesophagus, stomach, small intestine (duodenum, jejenum, ileum), large intestines (cecum and colon) and rectum. While the entire alimentary canal can be colonized by varying species of microbes, the majority of the gut microbiome, in terms of both numbers of species and biomass, resides in the intestines (small and large).

[0236] The terms “marker”, “biomarker” and the like, refer to any compound that can be measured as an indicator of the physiological status of a biological system. The marker may be a biomarker that comprises an amino acid sequence, a nucleic acid sequence and fragments thereof. Exemplary biomarkers include, but are not limited to cytokines, chemokines, growth and angiogenic factors, metastasis related molecules, cancer antigens, apoptosis related proteins, enzymes, proteases, adhesion molecules, cell signalling molecules and hormones. The marker may also be a sugar that, in some embodiments, may not be significantly metabolized in the biological system. The sugar may be, for example, mannitol, lactulose, sucrose, sucralose and combinations of any of the forgoing.

[0237] “Measuring” or “measurement” means assessing the presence, absence, quantity or amount (which can be an effective amount) of a given substance within a sample, including the derivation of qualitative or quantitative concentration levels of such substances, or otherwise evaluating the values or categorization of a subject's clinical parameters. Alternatively, the term “assaying,” “detecting” or “detection” may be used to refer to all measuring or measurement as described in this specification.

[0238] The term “mucosal healing” as used herein, means an improvement in one or more characteristics of that indicate an impaired mucosal layer. Such characteristics are usually determined by colonic endoscopy and include, but are not limited to, erythema, loss of vascular pattern, friability, bleeding, erosions and ulcers. In some circumstances, mucosal healing refers to a complete amelioration of detrimental effects that characterize an impaired mucosal layer. Alternatively, mucosal healing may refer to a reduction or improvement of one or more of the negative effects that characterize an impaired mucosal layer.

[0239] As used herein, the term “pharmaceutical composition” refers to the active agent in combination with a pharmaceutically acceptable carrier (e.g., a carrier commonly used in the pharmaceutical industry). The phrase “pharmaceutically acceptable” is employed herein to refer to those compounds, materials, compositions, and/or dosage forms which are, within the scope of sound medical judgement, suitable for use in contact with the tissues of human beings and animals without excessive toxicity, irritation, allergic response, or other problem or complication, commensurate with a reasonable benefit/risk ratio. In some embodiments of any of the aspects, a pharmaceutically acceptable carrier can be a carrier other than water. In some embodiments, any of the aspects a pharmaceutically acceptable carrier can be a cream, emulsion, gel, liposome, nanoparticle, and/or ointment. In some embodiments of any of the aspects, a pharmaceutically acceptable carrier can be an artificial or engineered carrier (e.g., a carrier that the active ingredient would not be found to occur in or within nature).

[0240] The term “phylogenetic tree” refers to a graphical representation of the evolutionary relationships of one genetic sequence to another that is generated using defined set of phylogenetic reconstruction algorithms (e.g., parsimony, maximum likelihood, or Bayesian). Nodes in the tree represent distinct ancestral sequences and the confidence of any node is provided by a bootstrap or Bayesian posterior probability, which measures branch uncertainty.

[0241] In some embodiments, the term “strain”, refers to a terminal leaf in a phylogenetic tree and is defined by a specific genetic sequence. The specific genetic sequence may be a concatenated alignment of 120 ubiquitous single-copy proteins (Parks et al., 2018) extracted from a genome assembly using GTDB-tk (Chaumeil et al., 2020) or other tools known in the art.

[0242] The term “clade” refers to the set of members of a phylogenetic tree downstream of a stable node (bootstrap value >90%) in a phylogenetic tree. A clade is a group of related organisms representing all of the phylogenetic descendants of a common ancestor. The clade comprises a set of terminal leaves in the phylogenetic tree that is a distinct monophyletic evolutionary unit.

[0243] As used herein, “prebiotic” is understood to mean an ingredient that allows specific changes, both in the composition and/or activity in the gastrointestinal microbiota that may (or may not) confer benefits upon the host. Favoured prebiotics will be those which encourage growth of probiotic compositions or their beneficial functions, but not growth of pathogens nor genes associated with pathogenicity (e.g., toxins).

[0244] As used herein, “probiotic” is understood to mean “live microorganisms which when administered in adequate amounts confer a health benefit on the host”, as currently defined by the World Health Organization.

[0245] The term “species” is defined as a collection of closely related organisms with greater than 97% 16S ribosomal RNA (rRNA) sequence homology and greater than 70% genomic hybridization and sufficiently different from all other organisms so as to be recognized as a distinct unit. Species and other phylogenic identifications are according to the classification known to a person skilled in the art of microbiology.

[0246] As used herein, a “subject” means a human or animal. Usually the animal is a vertebrate such as a primate, rodent, domestic animal or game animal. Primates include chimpanzees, cynomolgus monkeys, spider monkeys, and macaques (e.g., Rhesus). Rodents include mice, rates, woodchucks, ferrets, rabbits, and hamsters. Domestic and game animals include cows, horses, pigs, deer, bison, buffalo, feline species (e.g., domestic cat), canine species (e.g., dog, fox, wolf), avian species (e.g., chicken, emu, ostrich), and fish (e.g., trout, catfish, and salmon). In some embodiments the subject is a mammal (e.g., a primate (e.g., a human)). The terms “individual”, “patient” and “subject” are used interchangeably herein.

[0247] Preferably the subject is a mammal. The mammal can be a human, non-human primate, mouse, rat, dog, cat, horse or cow, but is not limited to these examples. Mammals other than humans can be advantageously used as subjects that represent animal models of inflammatory and autoimmune disorders (e.g., models of gut barrier function). A subject can be male or female.

[0248] As used herein, the terms “treat”, “treatment”, “treating” and the like, refer to therapeutic treatments, wherein the object is to reverse, alleviate, ameliorate, inhibit, slow down or stop the progression or severity of a condition associated with a disease or disorder (e.g., an inflammatory or autoimmune disorder). The term “treating” includes reducing or alleviating at least one adverse effect or symptom of a condition, disease or disorder associated with an inflammatory or autoimmune disorder. Treatment is generally “effective” if one or more symptoms or clinical markers are reduced. Alternatively, treatment is “effective” if the progression of a disease is reduced or halted. That is, “treatment” includes not just the improvement of symptoms or markers, but also a cessation of, or at least slowing of, progress or worsening of symptoms compared to what would be expected in the absence of treatment. Beneficial or desired clinical results include, but are not limited to, alleviation of one or more symptom(s), diminishment of extent of disease, stabilized (i.e., not worsening) state of disease, delay or slowing of disease progression, amelioration, or palliation of the disease state, remission (whether partial or total), and/or decreased mortality, whether detectable or undetectable. The term “treatment” of a disease also includes providing relief from the symptoms or side-effects of the disease (including palliative treatment). A treatment need not cure a disorder (i.e., complete reversal or absence of disease) to be considered effective.

[0249] In some embodiments, sequencing comprises 16S rRNA gene sequencing, which can also be referred to as “16S ribosomal RNA sequencing”, 16S rDNA sequencing” or “16S rRNA sequencing”. Sequencing of the 16S rRNA gene can be used for genetic studies as it is highly conserved between different species of bacteria, but it is not present in eukaryotic species. In addition to highly conserved regions, the 16S rRNA gene also comprises nine hypervariable regions (V1-V9) that vary between species. 16S rRNA gene sequencing typically comprises using a plurality of universal primers that bind to conserved regions of the 16S rRNA gene, PCT amplifying the bacterial 16S rRNA gene regions (including hypervariable regions), and sequencing the amplified 16S rRNA genes with a next-generation sequencing technology as described herein (see, also e.g., U.S. Pat. Nos. 5,654,418; 6,344,316; and 8,889,358; and U.S. Patent Publication Nos. 2013/157,265 and 2018/195,111, which are each incorporated by reference in their entireties).

[0250] Each embodiment described herein is to be applied mutatis mutandis to each and every embodiment unless specifically stated otherwise.

### 2. Bacterial Strains—Alistipes Species

[0251] The compositions of the invention comprise a bacterial strain of the genus Alistipes. The examples demonstrate that bacteria of this genus are useful for treating or preventing diseases associated with an impaired gut barrier function. The preferred bacterial strains are of the species A. shahii.

[0252] Alistipes is a genus of bacteria in the class Clostridia. The scientific classification is as follows: bacteria (kingdom); Bacteroidetes (phylum); Bacteroidia (class); Bacteroidales (order); Rikenellaceae (family); Alistipes (genus). Bacteria within the Alistipes genus are Gram-negative, non-motile bacteria with a short rod shape, and are obligate anaerobes. These criteria are important because they can inform the phylogenetic classification of bacterial strains.

[0253] A. shahii typically grows in circular colonies of about 0.5 mm to 1.0 mm and are pigment producing and non-fluorescing when grown on rabbit blood agar.

[0254] The A. shahii species was first described in Song et el., 2006. The A. shahii type strain WAL 8301(=ATCC BAA-1179) was isolated from human appendix tissue (Song et al., 2006). The GenBank accession number for the 16S rRNA gene sequence of the A. shahii type strain ATCC 27749 is NR_104846.

[0255] The breadth of the Alistipes genus and A. shahii species may be as defined by a Genome Taxonomy Database reference tree, a taxonomic classification system as described in Parks et al., 2018.

[0256] The A. shahii bacterium deposited under accession number V21/014432 (i.e., A. shahii MH21-1) was tested in the Examples and is one of the preferred strains of the invention. A. shahii strain MH21-1 was deposited with the international depositary authority National Measurement Institute (NMI, 1/153 Bertie Street, Port Melbourne, Victoria, 3207, Australia) by Microba IP Pty Ltd (388 Queen Street, Brisbane, Queensland 4000, Australia) on 22nd July 2021 as “Alistipes shahii MH21-1” and was assigned accession number V21/014432.

[0257] An exemplary 16S rRNA sequence for the A. shahii MH21-1 strain that was tested is set forth in SEQ ID NO: 1. Bacterial strains of the species A. shahii may comprise a single 16S rRNA sequence within its genome, or alternatively, may comprise two or more 16S rRNA sequences within its genome (e.g., two copies, three copies, four copies, five copies, six copies, seven copies, eight copies, or more than eight copies). In some embodiments, a bacterial strain may be identified as being of the A. shahii MH21-1 strain by determining whether the strain comprises a 16S rRNA sequence that corresponds to SEQ ID NO: 1, by any method known in the art. A chromosome sequence for strain A. shahii MH211-1 is provided in SEQ ID NO: 4. This sequence was generated using the Illumina NovSeq6000 platform.

[0258] Bacterial strains closely related to the strains MH21-1 are also shown in the examples to be effective for treating or preventing inflammatory and autoimmune disorders, through their beneficial effects on restoring gut barrier function.

[0259] For example, the A. shahii bacterium deposited under accession number V21/014433 (i.e., A. shahii MH23-2) was tested in the Examples and is another one of the preferred strains of the invention. An exemplary 16S rRNA sequence for the A. shahii MH212 strain that was tested is set forth in SEQ ID NO: 2. In some embodiments, a bacterial strain may be identified as being of the A. shahii MH21-2 strain by determining whether the strain comprises a 16S rRNA sequence that corresponds to SEQ ID NO: 2, by any method known in the art. Strain A. shahii MH21-2 was deposited with the international depositary authority National Measurement Institute (NMI, 1/153 Bertie Street, Port Melbourne, Victoria, 3207, Australia) by Microba IP Pty Ltd (388 Queen Street, Brisbane, QLD 4000, Australia) on 22, July 2021 as “Alistipes shahii MH21-2” and was assigned accession number V21/014433. The genome of strain A. shahii MH21-2 comprises a chromosome with a sequence as set forth in SEQ ID NO: 5.

[0260] For example, the A. shahii bacterium deposited under accession number V21/014434 (i.e., A. shahii MH23-3) was tested in the Examples and is another one of the preferred strains of the invention. An exemplary 16S rRNA sequence for the A. shahii MH21-3 strain that was tested is set forth in SEQ ID NO: 3. In some embodiments, a bacterial strain may be identified as being of the A. shahii MH21-3 strain by determining whether the strain comprises a 16S rRNA sequence that corresponds to SEQ ID NO: 3, by any method known in the art. Strain A. shahii MH21-3 was deposited with the international depositary authority National Measurement Institute (NMI, 1/153 Bertie Street, Port Melbourne, Victoria, 3207, Australia) by Microba IP Pty Ltd (388 Queen Street, Brisbane, QLD 4000, Australia) on 22 Jul. 2021 as “Alistipes shahii MH21-3” and was assigned accession number V21/014434. The genome of strain A. shahii MH21-3 comprises a chromosome with a sequence as set forth in SEQ ID NO: 6.

[0261] An exemplary 16S rRNA sequence for the A. shahii MH21-6 strain that was tested in the Examples is set forth in SEQ ID NO: 44. In some embodiments, a bacterial strain may be identified as being of the A. shahii MH21-6 strain by determining whether the strain comprises a 16S rRNA sequence that corresponds to SEQ ID NO: 44, by any method known in the art. The genome of strain A. shahii MH21-6 comprises a chromosome with a sequence as set forth in one or more of SEQ ID NOs: 38-43.

[0262] In certain embodiments, the bacterial strains of the invention have a 16S rRNA sequence that is at least 97.5%, 98%, 98.5%, 99%, 99.5%, 99.6%, 99.7%, 99.8%, or 99.9% identical to the 16S rRNA sequence of a bacterial strain of A. shahii. Preferably, the bacterial strain of the invention has a 16S rRNA sequence that is at least 97.5%, 98%, 98.5%, 99%, 99.5%, 99.6%, 99.7%, 99.8%, or 99.9% identical to any one of SEQ ID NOs: 1-3 and 44. In some preferred, the bacterial strain of the invention has a 16S rRNA sequence represented by any one of SEQ ID NOs: 1-3 and 44.

[0263] The genome of the bacterial strain may comprise the 16S rRNA sequence set forth in any one of SEQ ID NOs: 1-3 and 44.

[0264] In certain embodiments, the bacterial strain of the invention has a chromosome with sequence identity to SEQ ID NO: 4. In preferred embodiments, the bacterial strain of the invention has a chromosome with at least 90% sequence identity (e.g., at least 92%, 94%, 95%, 96%, 97%, 97.5%, 98%, 98.5%, 99%, 99.5%, or 100% sequence identity) to SEQ ID NO: 4 across at least 60% (e.g., at least 65%, 70%, 75%, 80%, 85%, 95%, 96%, 97%, 98%, 99% or 100%) of SEQ ID NO: 4. For example, the bacterial strain of the invention may have a chromosome with at least 90% sequence identity to SEQ ID NO: 4 across 70% of SEQ ID NO: 4, or at least 90% sequence identity to SEQ ID NO: 4 across 80% of SEQ ID NO: 4, or at least 90% sequence identity to SEQ ID NO: 4 across 90% of SEQ ID NO: 4, or at least 90% sequence identity to SEQ ID NO: 4 across 100% of SEQ ID NO: 4, or at least 95% sequence identity to SEQ ID NO: 4 across 70% of SEQ ID NO: 4, or at least 95% sequence identity to SEQ ID NO: 4 across 80% of SEQ ID NOs: 4, or at least 95% sequence identity to SEQ ID NO: 4 across 90% of SEQ ID NO: 4, or at least 95% sequence identity to SEQ ID NO: 4 across 100% of SEQ ID NO: 4, or at least 98% sequence identity to SEQ ID NO: 4 across 70% of SEQ ID NO: 4, or at least 98% sequence identity to SEQ ID NO: 4 across 80% of SEQ ID NO: 4, or at least 98% sequence identity to SEQ ID NO: 4 across 90% of SEQ ID NO: 4, or at least 98% sequence identity to SEQ ID NO: 4 across 100% of SEQ ID NO: 4. A particularly preferred strain of the invention is the A. shahii strain deposited under accession number V21/014432. This is the exemplary MH21-1 strain tested in the DSS mouse model presented in the examples and shown to be effective for treating disease. Therefore, the invention provides a cell, such as an isolated cell, of the A. shahii strain deposited under accession number V21/014432, or a derivative thereof. The invention also provides a composition comprising a cell of the A. shahii strain deposited under accession number V21/014432, or a derivative thereof. The invention also provides a biologically pure culture of the A. shahii MH21-1 strain deposited under accession number V21/014432.

[0265] In certain embodiments, the bacterial strain of the invention has a chromosome with sequence identity to SEQ ID NO: 5. In preferred embodiments, the bacterial strain of the invention has a chromosome with at least 90% sequence identity (e.g., at least 92%, 94%, 95%, 96%, 97%, 97.5%, 98%, 98.5%, 99%, 99.5%, or 100% sequence identity) to SEQ ID NO: 5 across at least 60% (e.g., at least 65%, 70%, 75%, 80%, 85%, 95%, 96%, 97%, 98%, 99% or 100%) of SEQ ID NO: 5. For example, the bacterial strain of the invention may have a chromosome with at least 90% sequence identity to SEQ ID NO: 5 across 70% of SEQ ID NO: 5, or at least 90% sequence identity to SEQ ID NO: 5 across 80% of SEQ ID NO: 5, or at least 90% sequence identity to SEQ ID NO: 5 across 90% of SEQ ID NO: 5, or at least 90% sequence identity to SEQ ID NO: 5 across 100% of SEQ ID NO: 5, or at least 95% sequence identity to SEQ ID NO: 5 across 70% of SEQ ID NO: 5, or at least 95% sequence identity to SEQ ID NO: 5 across 80% of SEQ ID NOs: 5, or at least 95% sequence identity to SEQ ID NO: 5 across 90% of SEQ ID NO: 5, or at least 95% sequence identity to SEQ ID NO: 5 across 100% of SEQ ID NO: 5, or at least 98% sequence identity to SEQ ID NO: 5 across 70% of SEQ ID NO: 5, or at least 98% sequence identity to SEQ ID NO: 5 across 80% of SEQ ID NO: 5, or at least 98% sequence identity to SEQ ID NO: 5 across 90% of SEQ ID NO: 5, or at least 98% sequence identity to SEQ ID NO: 5 across 100% of SEQ ID NO: 5. A particularly preferred strain of the invention is the A. shahii strain deposited under accession number V21/014433. This is the exemplary MH21-2 strain tested in the DSS mouse model presented in the examples and shown to be effective for treating disease. Therefore, the invention provides a cell, such as an isolated cell, of the A. shahii strain deposited under accession number V21/014433, or a derivative thereof. The invention also provides a composition comprising a cell of the A. shahii strain deposited under accession number V21/014433, or a derivative thereof. The invention also provides a biologically pure culture of the A. shahii MH21-2 strain deposited under accession number V21/01443.

[0266] In certain embodiments, the bacterial strain of the invention has a chromosome with sequence identity to SEQ ID NO: 6. In preferred embodiments, the bacterial strain of the invention has a chromosome with at least 90% sequence identity (e.g., at least 92%, 94%, 95%, 96%, 97%, 97.5%, 98%, 98.5%, 99%, 99.5%, or 100% sequence identity) to SEQ ID NO: 6 across at least 60% (e.g., at least 65%, 70%, 75%, 80%, 85%, 95%, 96%, 97%, 98%, 99% or 100%) of SEQ ID NO: 6. For example, the bacterial strain of the invention may have a chromosome with at least 90% sequence identity to SEQ ID NO: 6 across 70% of SEQ ID NO: 6, or at least 90% sequence identity to SEQ ID NO: 6 across 80% of SEQ ID NO: 6, or at least 90% sequence identity to SEQ ID NO: 6 across 90% of SEQ ID NO: 6, or at least 90% sequence identity to SEQ ID NO: 6 across 100% of SEQ ID NO: 6, or at least 95% sequence identity to SEQ ID NO: 6 across 70% of SEQ ID NO: 6, or at least 95% sequence identity to SEQ ID NO: 6 across 80% of SEQ ID NOs: 6, or at least 95% sequence identity to SEQ ID NO: 6 across 90% of SEQ ID NO: 6, or at least 95% sequence identity to SEQ ID NO: 6 across 100% of SEQ ID NO: 6, or at least 98% sequence identity to SEQ ID NO: 6 across 70% of SEQ ID NO: 6, or at least 98% sequence identity to SEQ ID NO: 6 across 80% of SEQ ID NO: 6, or at least 98% sequence identity to SEQ ID NO: 6 across 90% of SEQ ID NO: 6, or at least 98% sequence identity to SEQ ID NO: 6 across 100% of SEQ ID NO: 6. A particularly preferred strain of the invention is the A. shahii strain deposited under accession number V21/014434. This is the exemplary MH21-3 strain tested in the DSS mouse model presented in the examples and shown to be effective for treating disease. Therefore, the invention provides a cell, such as an isolated cell, of the A. shahii strain deposited under accession number V21/014434, or a derivative thereof. The invention also provides a composition comprising a cell of the A. shahii strain deposited under accession number V21/014434, or a derivative thereof. The invention also provides a biologically pure culture of the A. shahii MH21-3 strain deposited under accession number V21/01444.

[0267] In certain embodiments, the bacterial strain of the invention has a chromosome with sequence identity to one or more of SEQ ID NOs: 38-43. In preferred embodiments, the bacterial strain of the invention has a chromosome with at least 90% sequence identity (e.g., at least 92%, 94%, 95%, 96%, 97%, 97.5%, 98%, 98.5%, 99%, 99.5%, or 100% sequence identity) to one or more of SEQ ID NOs: 38-43 across at least 60% (e.g., at least 65%, 70%, 75%, 80%, 85%, 95%, 96%, 97%, 98%, 99% or 100%) of one or more of SEQ ID NOs: 38-43. For example, the bacterial strain of the invention may have a chromosome with at least 90% sequence identity to one or more of SEQ ID NOs: 38-43 across 70% of one or more of SEQ ID NOs: 38-43, or at least 90% sequence identity to one or more of SEQ ID NOs: 38-43 across 80% of one or more of SEQ ID NOs: 38-43, or at least 90% sequence identity to one or more of SEQ ID NOs: 38-43 across 90% of one or more of SEQ ID NOs: 38-43, or at least 90% sequence identity to one or more of SEQ ID NOs: 38-43 across 100% of one or more of SEQ ID NOs: 38-43, or at least 95% sequence identity to one or more of SEQ ID NOs: 38-43 across 70% of one or more of SEQ ID NOs: 38-43, or at least 95% sequence identity to one or more of SEQ ID NOs: 38-43 across 80% of one or more of SEQ ID NOs: 38-43, or at least 95% sequence identity to one or more of SEQ ID NOs: 38-43 across 90% of one or more of SEQ ID NOs: 38-43, or at least 95% sequence identity to one or more of SEQ ID NOs: 38-43 across 100% of one or more of SEQ ID NOs: 38-43, or at least 98% sequence identity to one or more of SEQ ID NOs: 38-43 across 70% of one or more of SEQ ID NOs: 38-43, or at least 98% sequence identity to one or more of SEQ ID NOs: 38-43 across 80% of one or more of SEQ ID NOs: 38-43, or at least 98% sequence identity to one or more of SEQ ID NOs: 38-43 across 90% of one or more of SEQ ID NOs: 38-43, or at least 98% sequence identity to one or more of SEQ ID NOs: 38-43 across 100% of one or more of SEQ ID NOs: 38-43. In preferred embodiments of this type, the bacterial strain has the stated sequence identity across each of SEQ ID Nos: 38-43.

[0268] A derivative of the strains deposited under any one of the accession numbers V21/014432, V21/014433, or V21/014434 may be a daughter strain (progeny) or a strain cultured (subcloned) from the original. A derivative of a strain of the invention may be modified, for example at the genetic level, without ablating the biological activity. In particular, a derivative strain of the invention is therapeutically active. A derivative strain will have comparable activity to the original V21/014432, V21/014433, or V21/014434 strains from which it is derived. In particular, a derivative strain will elicit comparable effects in at least one disease model (e.g., colitis) as shown in the Examples, which may be identified by using the culturing and administration protocols described in the Examples. A derivative of any one of the V21/014432, V21/014433, or V21/014434 strains will generally be a biotype of the respective V21/014432, V21/014433, or V21/014434 strains.

[0269] References to cells of the A. shahii strain deposited under accession number V21/014432 include any cells that have the same safety and therapeutic efficacy characteristics as the strains deposited under any one of accession numbers V21/014432, V21/014433, or V21/014434, and such cells are encompassed by the invention.

### 2.1 Bacteria Biotypes

[0270] Bacterial strains that are biotypes of a bacterium deposited under any one of accession numbers V21/014432, V21/014433, or V21/014434 are also expected to be effective for treating or preventing inflammatory and autoimmune disorders. A biotype is a closely related strain that has the same or very similar physiological and biochemical characteristics.

[0271] Strains that are biotypes of a bacterium deposited under any one of the accession numbers V21/014432, V21/014433, or V21/014434 and that are suitable for use in the invention may be identified by sequencing other nucleotide sequences for a bacterium deposited under any one of accession numbers V21/014432, V21/014433, or V21/014434. For example, substantially the whole genome may be sequenced and a biotype strain of the invention may have at least 95%, 96%, 97%, 98%, 99%, 99.5% or 99.9% sequence identity across at least 80% of its whole genome (e.g., across at least 85%, 90%, 95% or 99%, or across its whole genome). Other suitable sequences for use in identifying biotype strains may include hsp60 or repetitive sequences such as BOX, ERIC, (GTG)5, or REP (Masco et al., 2003; Kim et al., 2019). Biotype strains may have sequences with at least 95%, 96%, 97%, 98%, 99%, 99.5% or 99.9% sequence identity to the corresponding sequence of a bacterium deposited under any one of accession numbers V21/014432, V21/014433, or V21/014434.

[0272] Alternatively, strains that are biotypes of a bacterium deposited under any one of the accession numbers V21/014432, V21/014433, or V21/014434, and restriction fragment analysis and/or PCR analysis, for example by using fluorescent amplified fragment length polymorphism (FAFLP) and repetitive DNA element (rep)-PCR fingerprinting, or protein profiling, or partial 16S or 23S rRNA sequencing. In some preferred embodiments, such techniques may be used to identify other suitable A. shahii strains.

[0273] In certain embodiments, strains that are biotypes of a bacterium deposited under any one of accession numbers V21/014432, V21/014433, or V21/014434, and that are suitable for use in the invention are strains that provide the same pattern as a bacterium deposited under any one of accession numbers V21/014432, V21/014433, or V21/014434 when analysed by amplified ribosomal DNA restriction analysis (ARDRA), for example when using Sau3AI restriction enzyme (for exemplary methods and guidance see, for example, Sråtková et al., 2011). Alternatively, biotype strains are identified as strains that have the same carbohydrate fermentation patterns as a bacterium deposited under any one of accession numbers V21/014432, V21/014433, or V21/014434.

[0274] In some embodiments, bacterial strains useful in the invention may be identified by routinely profiling the production and consumption of metabolites by a bacterial strain. It is predicted that the bacterial strains described above and elsewhere herein effect production of acetate, butyrate, ethanol and fumarate. Therefore, in some embodiments, the bacterial strains of the invention induce the production in vivo of one or more of the metabolites acetate, ethanol, butyrate, and fumarate. Additionally, in some embodiments the bacterial strains of the invention do not produce butyrate.

[0275] Other Alistipes strains that are useful in the compositions and methods of the invention, such as biotypes of a bacterium deposited under accession numbers V21/014432, V21/014433, or V21/014434, may be identified using any appropriate method or strategy, including the assays described in the examples. For instance, strains for use in the invention may be identified by culturing in anaerobic TY or PYG media and/or administering the bacteria to the DSS-induced gut barrier function model and then assessing cytokine/chemokine levels, as described in the Examples. In particular, bacterial strains that have similar growth patterns, metabolic type and/or surface antigens to a bacterium deposited under accession number V21/014432, V21/014433, or V21/014434 may be useful in the invention. A useful strain will have comparable immunomodulatory activity to the V21/014432, V21/014433, or V21/014434 strain. In particular, a biotype strain will elicit comparable effects on host gut function. Furthermore, it is expected that a biotype will have a similar effect in a disease model (e.g., colitis, asthma, arthritis, multiple sclerosis and uveitis disease models) and comparable effects on cytokine/chemokine levels to the effects shown in the Examples, and which may be identified by using the culturing and administration protocols described in the Examples.

[0276] In some embodiments, the bacterial strain may be of the species A. finegoldii. The A. finegoldii species was first described in Rautio et al., 2003. The A. shahii type strain CCUG 406020(T) (=AHN 2437) was isolated from human appendix tissue from children (Rautio et al., 2003). The GenBank accession number for the 16S rRNA gene sequence of the A. finegoldii type strain AHN 2437 is NR_043064.

[0277] An exemplary 16S rRNA sequence for an A. finegoldii strain that was tested is set forth in SEQ ID NO: 7. Bacterial strains of the species A. finegoldii may comprise a single 16S rRNA sequence within its genome, or alternatively, may comprise two or more 16S rRNA sequences within its genome (e.g., two copies, three copies, four copies, five copies, six copies, seven copies, eight copies, or more than eight copies). In some embodiments, a bacterial strain may be identified as being of the A. finegoldii strain by determining whether the strain comprises a 16S rRNA sequence that corresponds to SEQ ID NO: 7, by any method known in the art. A chromosome sequence for strain A. finegoldii is provided in SEQ ID NO: 9. This sequence was obtained from NCBI Genbank accession no. CP003274, which relates to the A. finegoldii strain DSM 17242.

[0278] Bacterial strains of the A. finegoldii species and bacterial strains closely related to A. finegoldii strains are considered to be effective for treating or preventing inflammatory and autoimmune disorders (e.g., IBD), through their beneficial effects on restoring gut barrier function.

[0279] The A. onderdonkii species was first described in Song et el., 2006. The A. onderdonkii type strain WAL 8169 (=ATCC BAA-1178) was isolated from human appendix tissue (Song et al., 2006). The GenBank accession number for the 16S rRNA gene sequence of the A. onderdonkii type strain WAL 8169 is NR_043318.1.

[0280] The breadth of the A. shahii onderdonkii species may be as defined by a Genome Taxonomy Database reference tree, a taxonomic classification system as described in Parks et al., 2018.

[0281] An exemplary 16S rRNA sequence for an A. onderdonkii strain that is set forth in SEQ ID NO: 8. Bacterial strains of the species A. shahii may comprise a single 16S rRNA sequence within its genome, or alternatively, may comprise two or more 16S rRNA sequences within its genome (e.g., two copies, three copies, four copies, five copies, six copies, seven copies, eight copies, or more than eight copies). In some embodiments, a bacterial strain may be identified as being of the A. onderdonkii species by determining whether the strain comprises a 16S rRNA sequence that highly corresponds to SEQ ID NO: 8, by any method known in the art. A chromosome sequence for an A. onderdonkii strain is provided in SEQ ID NO: 10. This sequence was obtained from NCBI Genbank accession no. NR_043318.1, which relates to the A. onderdonkii strain WAL 8169.

[0282] Bacterial strains of the A. onderdonkii species and bacterial strains closely related to A. onderdonkii strains are considered to be effective for treating or preventing inflammatory and autoimmune disorders (e.g., IBD), through their beneficial effects on restoring gut barrier function.

### 2.2 Bacterial Strain Viability.

[0283] In preferred embodiments, the bacterial strains in the compositions of the invention are viable. In preferred embodiments, the bacterial strains in the compositions of the invention are viable and capable of partially or totally colonising the intestine. In some preferred embodiments, the bacterial strains in the compositions of the invention are live. By way of an example, the bacterial strains in the compositions of the invention have not been heat-killed. The bacteria of the invention may have immune modulatory effects that would not be exhibited by non-viable bacteria, for example because non-viable bacteria cannot produce metabolites and interact with the immune system in a different manner. The cell surface of a viable bacterium is also likely to be significantly different to a killed bacterium, in particular a heat-killed bacterium.

[0284] In some alternative embodiments, that bacteria are not viable. For example, in some embodiments the bacteria are heat-killed.

[0285] In some preferred embodiments, the bacterial strain for use in the invention is naturally-occurring. For example, the bacterial strain has been isolated from the mammalian digestive tract.

[0286] In some preferred embodiments, the bacterial strain for use in the invention has not been genetically engineered. For example, the bacterial strain has not been transformed with recombinant DNA.

### 3. Compositions—Alistipes Species

[0287] Provided herein are compositions that comprise, consist, or consist essentially of a therapeutically effective amount of a bacterial strain or strains described above and/or elsewhere herein. In some embodiments, the bacteria in the compositions may be identified by strain, species, operational taxonomic unit (OTU), whole genome sequence, 16S rRNA sequence, or other methods known in the art for defining different types of bacteria.

### 3.1 Most Recent Common Ancestor (MRCA)

[0288] In some embodiments, the compositions comprise an effective amount of a bacterial strain that is a phylogenetic descendant of the MRCA of A. timonensis and A. sp000434235 (see, FIG. 3b). Preferably, the phylogenetic classification is as defined by the GTDB (Parks et al., 2018). In some embodiments, the phylogenetic classification is as defined in release 89 (r89) of the GTDB.

[0289] In some embodiments, determining if a bacterial strain is a descendant of a MRCA of A. timonensis and A. sp000434235 may be performed using phylogenetic grouping procedures known in the art. In some embodiments, a rooted phylogenetic tree with A. timonensis and A. sp000434235, and a third taxon of interest (e.g., a taxon to be classified) may be used, with the following analysis packages being applied: Analyses of Phylogenetics and Evolution (“ape”; https://cran.r.project.org/web/packages/ape/index) and Phylogenetic Tool for Comparative Biology (“phytools”; http://cran.r-project.org/web/packages/phytools/index.html), in order to determine whether the taxon of interest is useful for the compositions of the present invention. Both ape and phytools are packages written in the R language for use in studying molecular evolution and phylogenetics. The ape and phytools packages provide methods for phylogenetic and evolutionary analysis and their use is known to one of skill in the art. In some embodiments, the following script may be used:

library(“ape”)
library(“phytools”)
input.tree = read.tree(file=“tree_file”)
alistip c(“s_{——}Alistipes sp900083545”, “s_{——}Alistipes sp000434235”)
alistip.node = getMRCA(input.tree, alistip)
alistip.tree = extract.clade(input.tree, alisip.node)
print(alistip.tree$tip.label)

[0290] In some embodiments, after the script is run, if the taxon of interest is in the printed list, it is a descendant of a MRCA of the two species.

[0291] In other embodiments, different phylogenetic grouping methods known in the art may be used to determine if a bacterial strain is a descendant of a MRCA of A. timonensis and A. sp000434235 (see, FIG. 3B), including methods that use different analysis packages and are based on different programming languages.

[0292] In some other embodiments, the bacterial strain is a phylogenetic descendant of the MRCA of A. timonensis and A. sp000434235, together with a pharmaceutically acceptable carrier, diluent, or excipient. Suitably, the MRCA is defined at node 35260 of the bac120 phylogenetic tree from the GTDB. In some embodiments, the phylogenetic tree is created by release 89 of the GTDB, however, any suitable subsequent release is considered to give equally as appliable results.

[0293] In some other embodiments, the bacterial strain is a phylogenetic descendant of the MRCA of A. timonensis and A. finegoldii, together with a pharmaceutically acceptable carrier, diluent, or excipient. Suitably, the MRCA is defined at node 35261 of the bac120 phylogenetic tree from the GTDB. In some embodiments, the phylogenetic tree is created by release 89 of the GTDB, however, any suitable subsequent release is considered to give equally as appliable results.

[0294] In some other embodiments, the bacterial strain is a phylogenetic descendant of the MRCA of A. timonensis and A. shahii, together with a pharmaceutically acceptable carrier, diluent, or excipient. Suitably, the MRCA is defined at node 35261 of the bac120 phylogenetic tree from the GTDB. In some embodiments, the phylogenetic tree is created by release 89 of the GTDB, however, any suitable subsequent release is considered to give equally as appliable results.

[0295] In some preferred embodiments, the bacterial strain is a phylogenetic descendant of the MRCA of A. shahii and A. finegoldii, together with a pharmaceutically acceptable carrier, diluent, or excipient. Suitably, the MRCA is defined at node of the bac120 phylogenetic tree from the GTDB. In some embodiments, the phylogenetic tree is created by release 89 of the GTDB, however, any suitable subsequent release is considered to give equally as appliable results.

[0296] In some embodiments, the compositions disclosed herein are substantially free of any bacteria of the species A. senegalensis. In some embodiments, the bacterial strain is not of the species A. senegalensis.

3.2 16S rRNA Sequence Identity.

[0297] In some embodiments, the 16S rRNA sequence is obtained or determined for a bacterial species to be classified. This query 16S rRNA sequence is compared to 16S rRNA sequences from bacterial species already classified as members of the Alistipes genus. In some embodiments, the query 16S rRNA sequence is compared to the 16S rRNA sequences set forth in SEQ ID NO: 1. In some embodiments, the query 16S rRNA sequence is compared to all known 16S rRNA sequences for bacterial species already classified as members of the Alistipes genus. In other embodiments, the query 16S rRNA sequence is compared to a subset of all known 16S rRNA sequences for bacterial species already classified as members of the Alistipes genus. A percent identity between the query sequence and the compared sequences is determined. If the percent identify of the query sequence is determined to be above a defined threshold, then the bacterial species to be classified is classified as member of the Alistipes genus.

[0298] In some embodiments, the threshold sequence identity is 95%. In some other embodiments, the threshold sequence identity is 97.5%. In some other embodiments, the threshold sequence identity is 99.0%. In some embodiments, the threshold sequence identity is 94.5%, 94.6%, 94.7%, 94.8%, 94.9%, 95.0%, 95.1%, 95.2%, 95.3%, 95.4%, 95.5%, 95.6%, 95.7%, 95.8%, 95.9%, 96.0%, 96.1%, 96.2%, 96.3%, 96.4%, 96.5%, 96.6%, 96.7%, 96.8%, 96.9%, 97.0%, 97.1%, 97.2%, 97.3%, 97.4%, 97.5%, 97.6%, 97.7%, 97.8%, 97.9%, 98.0%, 98.1%, 98.2%, 98.3%, 98.4%, 98.5%, 98.6%, 98.7%, 98.8%, 98.9% 99.0%, 99.1%, 99.2%, 99.3%, 99.4%, 99.5%, 99.6%, 99.7%, 99.8%, 99.9% or 100%.

[0299] In some embodiments, the 16S rRNA sequence is obtained or determined for a bacterial species to be classified. This query 16S rRNA sequence is compared to 16S rRNA sequences from bacterial species already classified as members of the family Rikenellaceae (including those set forth in any one of SEQ ID NO: 1-3). In some embodiments, the query 16S rRNA sequence is compared to all known 16S rRNA sequences for bacterial species already classified as members of the family Rikenellaceae. In other embodiments, the query 16S rRNA sequence is compared to a subset of all known 16S rRNA sequences for bacterial species already classified as members of the family Rikenellaceae. A percent identity between the query sequence and the compared sequences is determined. If the percent identify of the query sequence is determined to be above a defined threshold, then the bacterial species to be classified is classified as member of the family.

[0300] In some embodiments, the threshold sequence identity is 95%. In some embodiments, the threshold sequence identity is 98.7%. In some embodiments, the threshold sequence identity is 94.8%. In some embodiments, the threshold sequence identity is 94.5%, 94.6%, 94.7%, 94.8%, 94.9%, 95.0%, 95.1%, 95.2%, 95.3%, 95.4%, 95.5%, 95.6%, 95.7%, 95.8%, 95.9%, 96.0%, 96.1%, 96.2%, 96.3%, 96.4%, 96.5%, 96.6%, 96.7%, 96.8%, 96.9%, 97.0%, 97.1%, 97.2%, 97.3%, 97.4%, 97.5%, 97.6%, 97.7%, 97.8%, 97.9%, 98.0%, 98.1%, 98.2%, 98.3%, 98.4%, 98.5%, 98.6%, 98.7%, 98.8%, 98.9% 99.0%, 99.1%, 99.2%, 99.3%, 99.4%, 99.5%, 99.6%, 99.7%, 99.8%, 99.9%, or 100%.

[0301] In some embodiments, the compositions comprise an at least partially isolated bacterial strain of A. shahii describe above and/or elsewhere herein.

[0302] In certain embodiments, the bacterial strains of the invention have a 16S rRNA sequence that is at least 97.5%, 98%, 98.5%, 99%, 99.5%, 99.6%, 99.7%, 99.8%, or 99.9% identical to the 16S rRNA sequence of a bacterial strain of A. shahii. Preferably, the bacterial strain of the invention has a 16S rRNA sequence that is at least 97.5%, 98%, 98.5%, 99%, 99.5%, 99.6%, 99.7%, 99.8%, or 99.9% identical to any one of SEQ ID NOs: 1-3. In some preferred, the bacterial strain of the invention has a 16S rRNA sequence represented by any one of SEQ ID NOs: 1-3.

[0303] The genome of the bacterial strain may comprise the 16S rRNA sequence set forth in any one of SEQ ID NOs: 1-3.

### 3.3 Genomic Sequence Identity.

[0304] In certain embodiments, the bacterial strain of the invention has a chromosome with sequence identity to any one of SEQ ID NOs: 4-6. In preferred embodiments, the bacterial strain of the invention has a chromosome with at least 90% sequence identity (e.g., at least 92%, 94%, 95%, 96%, 97%, 97.5%, 98%, 98.5%, 99%, 99.5%, or 100% sequence identity) to any one of SEQ ID NOs: 4-6, across at least 60% (e.g., at least 65%, 70%, 75%, 80%, 85%, 95%, 96%, 97%, 98%, 99% or 100%) of SEQ ID NOs: 4-6. For example, the bacterial strain of the invention may have a chromosome with at least 90% sequence identity to any one of SEQ ID NOs: 4-6 across 70% of SEQ ID NOs: 4-6, or at least 90% sequence identity to any one of SEQ ID NOs: 4-6 across 80% of SEQ ID NOs: 4-6, or at least 90% sequence identity to any one of SEQ ID NOs: 4-6 across 90% of SEQ ID NOs: 4-6, or at least 90% sequence identity to any one of SEQ ID NOs: 4-6 across 100% of SEQ ID NOs: 4-6, or at least 95% sequence identity to any one of SEQ ID NOs: 4-6 across 70% of SEQ ID NOs: 4-6, or at least 95% sequence identity to any one of SEQ ID NO: 4-6 across 80% of SEQ ID NOs: 4-6, or at least 95% sequence identity to any one of SEQ ID NOs: 4-6 across 90% of SEQ ID NOs: 4-6, or at least 95% sequence identity to any one of SEQ ID NOs: 4-6 across 100% of SEQ ID NOs: 4-6, or at least 98% sequence identity to any one of SEQ ID NOs: 4-6 across 70% of SEQ ID NOs: 4-6, or at least 98% sequence identity to any one of SEQ ID NOs: 4-6 across 80% of SEQ ID NOs: 4-6, or at least 98% sequence identity to any one of SEQ ID NOs: 4-6 across 90% of SEQ ID NOs: 4-6, or at least 98% sequence identity to any one of SEQ ID NOs: 4-6 across 100% of SEQ ID NOs: 4-6. A particularly preferred strain of the invention is the A. shahii strain deposited under accession number V21/014432. This is the exemplary A. shahii MH21-1 strain tested in the DSS mouse model presented in the examples and shown to be effective for treating disease. Therefore, the invention provides a cell, such as an isolated cell, of the A. shahii strain deposited under accession number V21/014432, or a derivative thereof. The invention also provides a composition comprising a cell of the A. shahii strain deposited under accession number V21/014432, or a derivative thereof. The invention also provides a biologically pure culture of the A. shahii MH21-1 strain deposited under accession number V21/014432.

[0305] The invention also provides a composition comprising a cell of the A. shahii strain deposited under accession number V21/014433, or a derivative thereof. The invention also provides a biologically pure culture of the A. shahii MH21-1 strain deposited under accession number V21/014433.

[0306] The invention also provides a composition comprising a cell of the A. shahii strain deposited under accession number V21/014434, or a derivative thereof. The invention also provides a biologically pure culture of the A. shahii MH21-1 strain deposited under accession number V21/014434.

[0307] In certain embodiments, the compositions of the invention comprise an at least partially purified strain of A. finegoldii In some embodiments, the strain of A. finegoldii has a chromosome with sequence identity to SEQ ID NO: 9. In preferred embodiments, the bacterial strain of A. finegoldii has a chromosome with at least 90% sequence identity (e.g., at least 92%, 94%, 95%, 96%, 97%, 97.5%, 98%, 98.5%, 99%, 99.5%, or 100% sequence identity) to SEQ ID NO: 9 across at least 60% (e.g., at least 65%, 70%, 75%, 80%, 85%, 95%, 96%, 97%, 98%, 99% or 100%) of SEQ ID NO: 9. For example, the bacterial strain of A. finegoldii may have a chromosome with at least 90% sequence identity to SEQ ID NO: 9 across 70% of SEQ ID NO: 9, or at least 90% sequence identity to SEQ ID NO: 9 across 80% of SEQ ID NO: 9, or at least 90% sequence identity to SEQ ID NO: 9 across 90% of SEQ ID NO: 9, or at least 90% sequence identity to SEQ ID NO: 9 across 100% of SEQ ID NO: 5, or at least 95% sequence identity to SEQ ID NO: 9 across 70% of SEQ ID NO: 9, or at least 95% sequence identity to SEQ ID NO: 9 across 80% of SEQ ID NOs: 9, or at least 95% sequence identity to SEQ ID NO: 9 across 90% of SEQ ID NO: 9, or at least 95% sequence identity to SEQ ID NO: 9 across 100% of SEQ ID NO: 9, or at least 98% sequence identity to SEQ ID NO: 9 across 70% of SEQ ID NO: 9, or at least 98% sequence identity to SEQ ID NO: 9 across 80% of SEQ ID NO: 9, or at least 98% sequence identity to SEQ ID NO: 9 across 90% of SEQ ID NO: 9, or at least 98% sequence identity to SEQ ID NO: 9 across 100% of SEQ ID NO: 9.

[0308] In certain embodiments, the compositions of the invention comprise an at least partially purified strain of A. onderdonkii. In some embodiments, the strain of A. onderdonkii has a chromosome with sequence identity to SEQ ID NO: 10. In preferred embodiments, the bacterial strain of A. onderdonkii has a chromosome with at least 90% sequence identity (e.g., at least 92%, 94%, 95%, 96%, 97%, 97.5%, 98%, 98.5%, 99%, 99.5%, or 100% sequence identity) to SEQ ID NO: 10 across at least 60% (e.g., at least 65%, 70%, 75%, 80%, 85%, 95%, 96%, 97%, 98%, 99% or 100%) of SEQ ID NO: 10. For example, the bacterial strain of A. onderdonkii may have a chromosome with at least 90% sequence identity to SEQ ID NO: 10 across 70% of SEQ ID NO: 10, or at least 90% sequence identity to SEQ ID NO: 10 across 80% of SEQ ID NO: 10, or at least 90% sequence identity to SEQ ID NO: 10 across 90% of SEQ ID NO: 10, or at least 90% sequence identity to SEQ ID NO: 10 across 100% of SEQ ID NO: 10, or at least 95% sequence identity to SEQ ID NO: 10 across 70% of SEQ ID NO: 10, or at least 95% sequence identity to SEQ ID NO: 10 across 80% of SEQ ID NO: 10, or at least 95% sequence identity to SEQ ID NO: 10 across 90% of SEQ ID NO: 10, or at least 95% sequence identity to SEQ ID NO: 10 across 100% of SEQ ID NO: 10, or at least 98% sequence identity to SEQ ID NO: 10 across 70% of SEQ ID NO: 10, or at least 98% sequence identity to SEQ ID NO: 10 across 80% of SEQ ID NO: 10, or at least 98% sequence identity to SEQ ID NO: 10 across 90% of SEQ ID NO: 10, or at least 98% sequence identity to SEQ ID NO: 10 across 100% of SEQ ID NO: 10.

### 4. Bacterial Strains—Colonithrix sana

[0309] The compositions of the invention comprise a bacterial strain of the genus Colonithrix. The examples demonstrate that bacteria of this genus are useful for treating or preventing diseases associated with an impaired gut barrier function. The preferred bacterial strains are of the specie Colonithrix sana.

[0310] Colonithrix is a genus of bacteria in the class Clostridia. The scientific classification is as follows: bacteria (kingdom); Firmicutes_A (phylum); Clostridia (class); Oscillospirales (order); Oscillospiraceae (family); Colonithrix (genus). Bacteria within the Colonithrix genus are Gram-negative to Gram-variable, non-motile bacteria with a long, thin rod-like shape, and are obligate anaerobes. These criteria are important because they can inform the phylogenetic classification of bacterial strains. For instance, the bacterial species C. sana has previously been classified as belonging to the genus ER and/or Ruminococcaceae, based on these criteria in particular.

[0311] The breadth of the Colonithrix genus and C. sana species are as defined by a Genome Taxonomy Database reference tree, a taxonomic classification system as described in Parks et al., 2018.

[0312] The C. sana bacterium deposited under accession numbers V21/019213 (i.e., C. sana MH35-1) was tested in the Examples and is one of the preferred strains of the invention. C. sana strain MH35-1 and MH35-2 were deposited with the international depositary authority National Measurement Institute (NMI, 1/153 Bertie Street, Port Melbourne, Victoria, 3207, Australia) by Microba IP Pty Ltd (388 Queen Street, Brisbane, QLD 4000, Australia) on 28 Sep. 2021 as “Colonithrix sana MH35-1” and “Colonithrix sana MH35-2” and was assigned accession numbers V21/019213 and V21/019214, respectively.

[0313] Exemplary 16S rRNA sequences for the C. sana MH35-1 strain that was tested is set forth in any one of SEQ ID NOs: 11-14. Bacterial strains of the species may comprise a single 16S rRNA sequence within its genome, or alternatively, may comprise two or more 16S rRNA sequences within its genome (e.g., two copies, three copies, four copies, five copies, six copies, seven copies, eight copies, or more than eight copies). In some preferred embodiments, the bacterial strain of the species C. sana comprises four copies of a 16S rRNA sequence within its genome. In some embodiments, a bacterial strain may be identified as being of the C. sana MH35-1 strain by determining whether the strain comprises a 16S rRNA sequence that corresponds to any one of SEQ ID NOs: 11-14, by any method known in the art. A chromosome sequence for strain C. sana MH35-1 is provided in one or more of SEQ ID NOs: 19-22. In some embodiments, a chromosome sequence for strain C. sana MH35-1 comprises each of the sequences set forth in SEQ ID NOs: 19-22. These sequences were generated using the Illumina NovSeq6000 platform.

[0314] Exemplary 16S rRNA sequences for the C. sana MH35-2 strain that was tested is set forth in any one of SEQ ID NOs: 15-18. Bacterial strains of the species may comprise a single 16S rRNA sequence within its genome, or alternatively, may comprise two or more 16S rRNA sequences within its genome (e.g., two copies, three copies, four copies, five copies, six copies, seven copies, eight copies, or more than eight copies). In some preferred embodiments, the bacterial strain of the species C. sana comprises four copies of a 16S rRNA sequence within its genome. In some embodiments, a bacterial strain may be identified as being of the C. sana MH35-2 strain by determining whether the strain comprises a 16S rRNA sequence that corresponds to any one of SEQ ID NOs: 15-18, by any method known in the art. A chromosome sequence for strain C. sana MH35-1 is provided in one or more of SEQ ID NOs: 23-26. In some embodiments, a chromosome sequence for strain C. sana MH35-2 comprises each of the sequences set forth in SEQ ID NOs: 23-26. These sequences were generated using the Illumina NovSeq6000 platform.

[0315] Bacterial strains closely related to the C. sana strains MH35-1 and MH35-2 are also considered to be effective for treating or preventing inflammatory and autoimmune disorders, through their beneficial effects on restoring gut barrier function.

[0316] In certain embodiments, the bacterial strains of the invention have a 16S rRNA sequence that is at least 97.5%, 98%, 98.5%, 99%, 99.5%, 99.6%, 99.7%, 99.8%, or 99.9% identical to the 16S rRNA sequence of a bacterial strain of C. sana. Preferably, the bacterial strain of the invention has a 16S rRNA sequence that is at least 97.5%, 98%, 98.5%, 99%, 99.5%, 99.6%, 99.7%, 99.8%, or 99.9% identical to any one of SEQ ID NOs: 11-18. In some preferred embodiments, the bacterial strain of the invention has a 16S rRNA sequence represented by any one of SEQ ID NOs: 11-18. In some of the same preferred embodiments, the bacterial strain of the invention has four copies of a 16S rRNA sequence represented by at least one, two, three, or all of SEQ ID NOs: 11-14. In some other preferred embodiments, the bacterial strain of the invention has four copies of a 16S rRNA sequence represented by at least one, two, three, or all of SEQ ID NOs: 15-18.

[0317] The genome of the bacterial strain may comprise each of the 16S rRNA sequences set forth in SEQ ID NO: 11-14. Alternatively, the genome of the bacterial strain may comprise each of the 16S rRNA sequences set forth in SEQ ID NO: 15-18.

[0318] In certain embodiments, the bacterial strain of the invention has a chromosome with sequence identity to any one of SEQ ID NOs: 19-22 or 23-26. In preferred embodiments, the bacterial strain of the invention has a chromosome with at least 90% sequence identity (e.g., at least 92%, 94%, 95%, 96%, 97%, 97.5%, 98%, 98.5%, 99%, 99.5%, or 100% sequence identity) to any one of SEQ ID NOs: 19-22 or 23-26 across at least 60% (e.g., at least 65%, 70%, 75%, 80%, 85%, 95%, 96%, 97%, 98%, 99% or 100%) of any one of SEQ ID NOs: 19-22 or 23-26. For example, the bacterial strain of the invention may have a chromosome with at least 90% sequence identity to any one of SEQ ID NOs: 19-22 or 23-26 across 70% of any one of SEQ ID NOs: 19-22 or 23-26, or at least 90% sequence identity to any one of SEQ ID NOs: 19-22 or 23-26 across 80% of any one of SEQ ID NOs: 19-22 or 23-26, or at least 90% sequence identity to any one of SEQ ID NOs: 19-22 or 23-26 across 90% of any one of SEQ ID NOs: 19-22 or 23-26, or at least 90% sequence identity to any one of SEQ ID NOs: 19-22 or 23-26 across 100% of any one of SEQ ID NOs: 19-22 or 23-26, or at least 95% sequence identity to any one of SEQ ID NOs: 19-22 or 23-26 across 70% of any one of SEQ ID NOs: 19-22 or 23-26, or at least 95% sequence identity to any one of SEQ ID NOs: 19-22 or 23-26 across 80% of any one of SEQ ID NOs: 19-22 or 23-26, or at least 95% sequence identity to any one of SEQ ID NOs: 15-18 across 90% of any one of SEQ ID NOs: 19-22 or 23-26, or at least 95% sequence identity to any one of SEQ ID NOs: 19-22 or 23-26 across 100% of any one of SEQ ID NOs: 19-22 or 23-26, or at least 98% sequence identity to any one of SEQ ID NOs: 19-22 or 23-26 across 70% of any one of SEQ ID NOs: 19-22 or 23-26, or at least 98% sequence identity to any one of SEQ ID NOs: 19-22 or 23-26 across 80% of any one of SEQ ID NOs: 19-22 or 23-26, or at least 98% sequence identity to any one of SEQ ID NOs: 19-22 or 23-26 across 90% of any one of SEQ ID NOs: 19-22 or 23-26, or at least 98% sequence identity to any one of SEQ ID NOs: 19-22 or 23-26 across 100% of any one of SEQ ID NOs: 19-22 or 23-26. A particularly preferred strain of the invention is the C. sana strain deposited under accession numbers V21/019213 and/or V21/019214. This is the exemplary C. sana MH35-1 and C. sana MH35-2 strains tested in the DSS mouse model presented in the examples and shown to be effective for treating disease. Therefore, the invention provides a cell, such as an isolated cell, of the C. sana strains deposited under accession numbers V21/019213 and/or V21/019214, or a derivative thereof. The invention also provides a composition comprising a cell of the C. sana strains deposited under accession numbers V21/019213 and/or V21/019214, or a derivative thereof. The invention also provides a biologically pure culture of the C. sana MH35-1 and MH35-2 strains deposited under accession numbers V21/019213 and V21/019214, respectively.

[0319] A derivative of the strains deposited under the accession number V21/019213 or V21/019214, may be daughter strains (progeny) or strains cultured (subcloned) from the original. A derivative of a strain of the invention may be modified, for example at the genetic level, without ablating the biological activity. In particular, a derivative strain of the invention is therapeutically active. A derivative strain will have comparable activity to the original V21/019213 or V21/019214 strains from which it is derived. In particular, a derivative strain will elicit comparable effects in at least one disease model (e.g., colitis) as shown in the Examples, which may be identified by using the culturing and administration protocols described in the Examples. A derivative of any one of the V21/019213 or V21/019214 strains will generally be a biotype of the respective V21/019213 and V21/019214 strains.

[0320] References to cells of the C. sana strain deposited under accession numbers V21/019213 or V21/019214 include any cells that have the same safety and therapeutic efficacy characteristics as the strains deposited under accession numbers V21/019213 or V21/019214, and such cells are encompassed by the invention.

### 4.1 Bacteria Biotypes

[0321] Bacterial strains that are biotypes of a bacterium deposited under accession numbers V21/019213 or V21/019214 are also expected to be effective for treating or preventing inflammatory and autoimmune disorders. A biotype is a closely related strain that has the same or very similar physiological and biochemical characteristics.

[0322] Strains that are biotypes of a bacterium deposited under the accession numbers V21/019213 or V21/019214 and that are suitable for use in the invention may be identified by sequencing other nucleotide sequences for a bacterium deposited under accession numbers V21/019213 or V21/019214. For example, substantially the whole genome may be sequenced and a biotype strain of the invention may have at least 95%, 96%, 97%, 98%, 99%, 99.5% or 99.9% sequence identity across at least 80% of its whole genome (e.g., across at least 85%, 90%, 95% or 99%, or across its whole genome). Other suitable sequences for use in identifying biotype strains may include hsp60 or repetitive sequences such as BOX, ERIC, (GTG)5, or REP (Masco et al., 2003; Kim et al., 2019). Biotype strains may have sequences with at least 95%, 96%, 97%, 98%, 99%, 99.5% or 99.9% sequence identity to the corresponding sequence of a bacterium deposited under accession numbers V21/019213 or V21/019214.

[0323] Alternatively, strains that are biotypes of a bacterium deposited under the accession numbers V21/019213 or V21/019214, and restriction fragment analysis and/or PCR analysis, for example by using fluorescent amplified fragment length polymorphism (FAFLP) and repetitive DNA element (rep)-PCR fingerprinting, or protein profiling, or partial 16S or 23S rRNA sequencing. In some preferred embodiments, such techniques may be used to identify other suitable C. sana strains.

[0324] In certain embodiments, strains that are biotypes of a bacterium deposited under accession numbers V21/019213 or V21/019214, and that are suitable for use in the invention are strains that provide the same pattern as a bacterium deposited under accession numbers V21/019213 or V21/019214 when analysed by amplified ribosomal DNA restriction analysis (ARDRA), for example when using Sau3AI restriction enzyme (for exemplary methods and guidance see, for example, Sråtková et al., 2011). Alternatively, biotype strains are identified as strains that have the same carbohydrate fermentation patterns as a bacterium deposited under accession numbers V21/019213 or V21/019214.

[0325] In some embodiments, bacterial strains useful in the invention may be identified by routinely profiling the production and consumption of metabolites by a bacterial strain. It is predicted that the bacterial strains described above and elsewhere herein effect production of acetate, butyrate, ethanol and fumarate. Therefore, in some embodiments, the bacterial strains of the invention induce the production in vivo of one or more of the metabolites acetate, ethanol, butyrate, and fumarate. Additionally, in some embodiments the bacterial strains of the invention do not produce butyrate.

[0326] Other Colonithrix strains that are useful in the compositions and methods of the invention, such as biotypes of a bacterium deposited under accession numbers V21/019213 and/or V21/019214, may be identified using any appropriate method or strategy, including the assays described in the examples. For instance, strains for use in the invention may be identified by culturing in anaerobic TY or PYG media and/or administering the bacteria to the DSS-induced gut barrier function model and then assessing cytokine/chemokine levels, as described in the Examples. In particular, bacterial strains that have similar growth patterns, metabolic type and/or surface antigens to a bacterium deposited under accession numbers V21/019213 and/or V21/019214 may be useful in the invention. A useful strain will have comparable immunomodulatory activity to the V21/019213 and/or V21/019214 strains. In particular, a biotype strain will elicit comparable effects on host gut function. Furthermore, it is expected that a biotype will have a similar effect in a disease model (e.g., colitis, asthma, arthritis, multiple sclerosis and uveitis disease models) and comparable effects on cytokine/chemokine levels to the effects shown in the Examples, and which may be identified by using the culturing and administration protocols described in the Examples.

### 4.2 Bacterial Strain Viability.

[0327] In preferred embodiments, the bacterial strains in the compositions of the invention are viable. In preferred embodiments, the bacterial strains in the compositions of the invention are viable and capable of partially or totally colonising the intestine. In some preferred embodiments, the bacterial strains in the compositions of the invention are live. By way of an example, the bacterial strains in the compositions of the invention have not been heat-killed. The bacteria of the invention may have immune modulatory effects that would not be exhibited by non-viable bacteria, for example because non-viable bacteria cannot produce metabolites and interact with the immune system in a different manner. The cell surface of a viable bacterium is also likely to be significantly different to a killed bacterium, in particular a heat-killed bacterium.

[0328] In some alternative embodiments, that bacteria are not viable. For example, in some embodiments the bacteria are heat-killed.

[0329] In some preferred embodiments, the bacterial strain for use in the invention is naturally-occurring. For example, the bacterial strain has been isolated from the mammalian digestive tract.

[0330] In some preferred embodiments, the bacterial strain for use in the invention has not been genetically engineered. For example, the bacterial strain has not been transformed with recombinant DNA.

### 5. Compositions—Colonithrix Species

[0331] Provided herein are compositions that comprise, consist, or consist essentially of a therapeutically effective amount of a bacterial strain or strains described above and/or elsewhere herein. In some embodiments, the bacteria in the compositions may be identified by strain, species, operational taxonomic unit (OTU), whole genome sequence, 16S rRNA sequence, or other methods known in the art for defining different types of bacteria.

### 5.1 Most Recent Common Ancestor (MRCA)

[0332] In some embodiments, the compositions comprise an effective amount of a bacterial strain that is a phylogenetic descendant of the MRCA of C. sp003522105 and C. sp002437735 (see, FIG. 8). Preferably, the phylogenetic classification is as defined by the GTDB (Parks et al., 2018). In some embodiments, the phylogenetic classification is as defined in release 89 (r89) of the GTDB.

[0333] In some embodiments, determining if a bacterial strain is a descendant of a MRCA of C. sp003522105 and C. sp002437735 may be performed using phylogenetic grouping procedures known in the art. In some embodiments, a rooted phylogenetic tree with C. sp003522105, C. sp002437735, and a third taxon of interest (e.g., a taxon to be classified) may be used, with the following the analysis packages being applied: Analyses of Phylogenetics and Evolution (ape: https://cran.r-proiect.org/web/packages/ape/index.html) and Phylogenetic Tool for Comparative Biology (“phytools”; http://cran.r-project.org/web/packages/phytools/index.html), in order to determine whether the taxon of interest is useful for the compositions of the present invention. Both ape and phytools are packages written in the R language for use in studying molecular evolution and phylogenetics. The ape and phytools packages provide methods for phylogenetic and evolutionary analysis and their use is known to one of skill in the art. In some embodiments, the following script may be used:

library(“ape”)
library(“phytools”)
input.tree = read.tree(file=“tree_file”)
colonithrix = c(“s_{——}C. sp003522105”, “s_{——}C. sp002437735”))
colonithrix.node = getMRCA(input.tree, colonithrix)
colonithrix.tree = extract.clade(input.tree, colonithrix.node)
print(colonithrix.tree$tip.label)

[0334] In some embodiments, after the script is run, if the taxon of interest is in the printed list, it is a descendant of a MRCA of the two species.

[0335] In other embodiments, different phylogenetic grouping methods known in the art may be used to determine if a bacterial strain is a descendant of a MRCA of C. sp003522105 and C. sp002437735 (see, FIG. 8), including methods that use different analysis packages and are based on different programming languages.

[0336] In some other embodiments, the bacterial strain is a phylogenetic descendant of the MRCA of C. sp003522105 and C. sp002437735, together with a pharmaceutically acceptable carrier, diluent, or excipient. Suitably, the MRCA is defined at node 23879 of the bac120 phylogenetic tree from the GTDB. In some embodiments, the phylogenetic tree is created by release 89 of the GTDB, however, any suitable subsequent release is considered to give equally as appliable results.

[0337] In some other embodiments, the bacterial strain is a phylogenetic descendant of the MRCA of C. sp003522105 and C. sp002437735, together with a pharmaceutically acceptable carrier, diluent, or excipient. Suitably, the MRCA is defined at node 23820 of the bac120 phylogenetic tree from the GTDB. In some embodiments, the phylogenetic tree is created by release 89 of the GTDB, however, any suitable subsequent release is considered to give equally as appliable results.

[0338] In other embodiments, a bacterial species is a member of the family Oscillospiraceae if the species has a 16S rRNA sequence with sequence identity to 16S rRNA sequences from species already identified as a member of the family Oscillospiraceae. In some embodiments, identification of whether a bacterial species is a member of the family Oscillospiraceae is performed using the methods described in Yarza et al., 2014, Nature Reviews Microbiology 12:635-645, and Stackebrandt, E. & Ebers, J., 2006, Microbiol. Today 8:6-9, which are hereby incorporated by reference herein.

5.2 16S rRNA Sequence Identity

[0339] In some embodiments, the 16S rRNA sequence is obtained or determined for a bacterial species to be classified. This query 16S rRNA sequence is compared to 16S rRNA sequences from bacterial species already classified as members of the Colonithrix genus. In some embodiments, the query 16S rRNA sequence is compared to the 16S rRNA sequences set forth in any one of SEQ ID NOs: 11-18. In some embodiments, the query 16S rRNA sequence is compared to all known 16S rRNA sequences for bacterial species already classified as members of the Colonithrix genus. In other embodiments, the query 16S rRNA sequence is compared to a subset of all known 16S rRNA sequences for bacterial species already classified as members of the Colonithrix genus. A percent identity between the query sequence and the compared sequences is determined. If the percent identify of the query sequence is determined to be above a defined threshold, then the bacterial species to be classified is classified as member of the Colonithrix genus.

[0340] In some embodiments, the threshold sequence identity is 95%. In some other embodiments, the threshold sequence identity is 97.5%. In some other embodiments, the threshold sequence identity is 99.0%. In some embodiments, the threshold sequence identity is 94.5%, 94.6%, 94.7%, 94.8%, 94.9%, 95.0%, 95.1%, 95.2%, 95.3%, 95.4%, 95.5%, 95.6%, 95.7%, 95.8%, 95.9%, 96.0%, 96.1%, 96.2%, 96.3%, 96.4%, 96.5%, 96.6%, 96.7%, 96.8%, 96.9%, 97.0%, 97.1%, 97.2%, 97.3%, 97.4%, 97.5%, 97.6%, 97.7%, 97.8%, 97.9%, 98.0%, 98.1%, 98.2%, 98.3%, 98.4%, 98.5%, 98.6%, 98.7%, 98.8%, 98.9% 99.0%, 99.1%, 99.2%, 99.3%, 99.4%, 99.5%, 99.6%, 99.7%, 99.8%, 99.9% or 100%.

[0341] In some embodiments, the 16S rRNA sequence is obtained or determined for a bacterial species to be classified. This query 16S rRNA sequence is compared to 16S rRNA sequences from bacterial species already classified as members of the family Oscillospiraceae. In some embodiments, the query 16S rRNA sequence is compared to all known 16S rRNA sequences for bacterial species already classified as members of the family Oscillospiraceae. In other embodiments, the query 16S rRNA sequence is compared to a subset of all known 16S rRNA sequences for bacterial species already classified as members of the family Oscillospiraceae. A percent identity between the query sequence and the compared sequences is determined. If the percent identify of the query sequence is determined to be above a defined threshold, then the bacterial species to be classified is classified as member of the family Oscillospiraceae.

[0342] In some embodiments, the threshold sequence identity is 95%. In some embodiments, the threshold sequence identity is 98.7%. In some embodiments, the threshold sequence identity is 94.8%. In some embodiments, the threshold sequence identity is 94.5%, 94.6%, 94.7%, 94.8%, 94.9%, 95.0%, 95.1%, 95.2%, 95.3%, 95.4%, 95.5%, 95.6%, 95.7%, 95.8%, 95.9%, 96.0%, 96.1%, 96.2%, 96.3%, 96.4%, 96.5%, 96.6%, 96.7%, 96.8%, 96.9%, 97.0%, 97.1%, 97.2%, 97.3%, 97.4%, 97.5%, 97.6%, 97.7%, 97.8%, 97.9%, 98.0%, 98.1%, 98.2%, 98.3%, 98.4%, 98.5%, 98.6%, 98.7%, 98.8%, 98.9% 99.0%, 99.1%, 99.2%, 99.3%, 99.4%, 99.5%, 99.6%, 99.7%, 99.8%, 99.9%, or 100%.

### 6. Bacterial Strains—Gemmiger Species

[0343] The compositions of the invention comprise a bacterial strain of the genus Gemmiger. The examples demonstrate that bacteria of this genus are useful for treating or preventing diseases associated with an impaired gut barrier function. Some of the preferred bacterial strains are of the species G. formicilis.

[0344] Gemmiger is a genus of bacteria in the class Clostridia. The scientific classification is as follows: bacteria (kingdom); Firmicutes (phylum); Clostridia (class); Clostridiales (order); Ruminococcaceae (family); Gemmiger (genus). Bacteria within the Gemmiger genus are Gram-negative to Gram-variable, non-motile bacteria with a “budding” shape, and are obligate anaerobes. These criteria are important because they can inform the phylogenetic classification of bacterial strains. For instance, the bacterial species G. formicilis has previously been classified as belonging to the genus Subdoligranulum, based on these criteria in particular.

[0345] G. formicilis strains (previously characterized as Subdoligranulum formicilis) are described in Gossling and Moore, 1975. The type strain G. formicilis Virginia Polytechnic Institute strain X2-56 (=ATCC 27749) was isolated from human feces (Gossling and Moore, 1975). The GenBank accession number for the 16S rRNA gene sequence of the G. formicilis type strain ATCC 27749 is NR_104846.

[0346] The breadth of the Gemmiger genus and G. formicilis species are as defined by a Genome Taxonomy Database reference tree, a taxonomic classification system as described in Parks et al., 2018.

[0347] The G. formicilis bacterium deposited under accession number V21/011520 (i.e., G. formicilis MH32-1) was tested in the Examples and is one of the preferred strains of the invention. G. formicilis strain MH32-1 was deposited with the international depositary authority National Measurement Institute (NMI, 1/153 Bertie Street, Port Melbourne, Victoria, 3207, Australia) by Microba IP Pty Ltd (388 Queen Street, Brisbane, QLD 4000, Australia) on 11, June 2021 as “Gemmiger formicilis MH32-1” and was assigned accession number V21/011520.

[0348] An exemplary 16S rRNA sequence for the MH321 strain that was tested is set forth in SEQ ID NO: 27. Bacterial strains of the species G. formicilis may comprise a single 16S rRNA sequence within its genome, or alternatively, may comprise two or more 16S rRNA sequences within its genome (e.g., two copies, three copies, four copies, five copies, six copies, seven copies, eight copies, or more than eight copies). In some embodiments, a bacterial strain may be identified as being of the G. formicilis MH32-1 strain by determining whether the strain comprises a 16S rRNA sequence that corresponds to SEQ ID NO: 27, by any method known in the art. A chromosome sequence for strain MH32-1 is provided in SEQ ID NO: 28. This sequence was generated using the Illumina NovSeq6000 platform.

[0349] Bacterial strains closely related to the strains G. formicilis MH32-1 and/or G. formicilis MH32-2 are also considered to be effective for treating or preventing inflammatory and autoimmune disorders, through their beneficial effects on restoring gut barrier function.

[0350] In certain embodiments, the bacterial strains of the invention have a 16S rRNA sequence that is at least 97.5%, 98%, 98.5%, 99%, 99.5%, 99.6%, 99.7%, 99.8%, or 99.9% identical to the 16S rRNA sequence of a bacterial strain of G. formicilis. Preferably, the bacterial strain of the invention has a 16S rRNA sequence that is at least 97.5%, 98%, 98.5%, 99%, 99.5%, 99.6%, 99.7%, 99.8%, or 99.9% identical to SEQ ID NO: 27 or one or more of SEQ ID NOs: 45-47. In some preferred, the bacterial strain of the invention has a 16S rRNA sequence represented by SEQ ID NO: 27 or one or more of SEQ ID NOs: 45-47.

[0351] The genome of the bacterial strain may comprise the 16S rRNA sequence set forth in SEQ ID NO: 27. Alternatively, he genome of the bacterial strain may comprise the 16S rRNA sequence set forth in one or more of SEQ ID NO: 45-47.

[0352] In certain embodiments, the bacterial strain of the invention has a chromosome with sequence identity to SEQ ID NO: 28. In preferred embodiments, the bacterial strain of the invention has a chromosome with at least 90% sequence identity (e.g., at least 92%, 94%, 95%, 96%, 97%, 97.5%, 98%, 98.5%, 99%, 99.5%, or 100% sequence identity) to SEQ ID NO: 28 across at least 60% (e.g., at least 65%, 70%, 75%, 80%, 85%, 95%, 96%, 97%, 98%, 99% or 100%) of SEQ ID NO: 28. For example, the bacterial strain of the invention may have a chromosome with at least 90% sequence identity to SEQ ID NO: 28 across 70% of SEQ ID NO: 28, or at least 90% sequence identity to SEQ ID NO: 28 across 80% of SEQ ID NO: 28, or at least 90% sequence identity to SEQ ID NO: 28 across 90% of SEQ ID NO: 28, or at least 90% sequence identity to SEQ ID NO: 28 across 100% of SEQ ID NO: 28, or at least 95% sequence identity to SEQ ID NO: 28 across 70% of SEQ ID NO: 28, or at least 95% sequence identity to SEQ ID NO: 28 across 80% of SEQ ID NOs: 28, or at least 95% sequence identity to SEQ ID NO: 28 across 90% of SEQ ID NO: 28, or at least 95% sequence identity to SEQ ID NO: 28 across 100% of SEQ ID NO: 28, or at least 98% sequence identity to SEQ ID NO: 28 across 70% of SEQ ID NO: 28, or at least 98% sequence identity to SEQ ID NO: 28 across 80% of SEQ ID NO: 28, or at least 98% sequence identity to SEQ ID NO: 28 across 90% of SEQ ID NO: 28, or at least 98% sequence identity to SEQ ID NO: 28 across 100% of SEQ ID NO: 28. A particularly preferred strain of the invention is the G. formicilis strain deposited under accession number V21/011520. This is the exemplary G. formicilis MH32-1 strain tested in the DSS mouse model presented in the examples and shown to be effective for treating disease. Therefore, the invention provides a cell, such as an isolated cell, of the G. formicilis strain deposited under accession number V21/011520, or a derivative thereof. The invention also provides a composition comprising a cell of the G. formicilis strain deposited under accession number V21/011520, or a derivative thereof. The invention also provides a biologically pure culture of the G. formicilis MH32-1 strain deposited under accession number V21/011520.

[0353] In other embodiments, the bacterial strain of the invention has a chromosome with sequence identity to any one of SEQ ID NOs: 29-33. In preferred embodiments, the bacterial strain of the invention has a chromosome with at least 90% sequence identity (e.g., at least 92%, 94%, 95%, 96%, 97%, 97.5%, 98%, 98.5%, 99%, 99.5%, or 100% sequence identity) any one of SEQ ID NOs: 29-33 across at least 60% (e.g., at least 65%, 70%, 75%, 80%, 85%, 95%, 96%, 97%, 98%, 99% or 100%) of any one of SEQ ID NOs: 29-33. For example, the bacterial strain of the invention may have a chromosome with at least 90% sequence identity to any one of SEQ ID NOs: 29-33 across 70% of any one of SEQ ID NOs: 29-33, or at least 90% sequence identity to any one of SEQ ID NOs: 29-33 across 80% of any one of SEQ ID NOs: 29-33, or at least 90% sequence identity to any one of SEQ ID NOs: 29-33 across 90% of any one of SEQ ID NOs: 29-33, or at least 90% sequence identity to any one of SEQ ID NOs: 29-33 across 100% of any one of SEQ ID NOs: 29-33, or at least 95% sequence identity to any one of SEQ ID NOs: 29-33 across 70% of any one of SEQ ID NOs: 29-33, or at least 95% sequence identity to any one of SEQ ID NOs: 29-33 across 80% of any one of SEQ ID NOs: 29-33, or at least 95% sequence identity to any one of SEQ ID NOs: 29-33 across 90% of any one of SEQ ID NOs: 29-33, or at least 95% sequence identity to any one of SEQ ID NOs: 29-33 across 100% of any one of SEQ ID NOs: 29-33, or at least 98% sequence identity to any one of SEQ ID NOs: 29-33 across 70% of any one of SEQ ID NOs: 29-33, or at least 98% sequence identity to any one of SEQ ID NOs: 29-33 across 80% of any one of SEQ ID NOs: 29-33, or at least 98% sequence identity to any one of SEQ ID NOs: 29-33 across 90% of any one of SEQ ID NOs: 29-33, or at least 98% sequence identity to any one of SEQ ID NOs: 29-33 across 100% of any one of SEQ ID NOs: 29-33.

[0354] In certain embodiments, the bacterial strains of the invention have a 16S rRNA sequence that is at least 97.5%, 98%, 98.5%, 99%, 99.5%, 99.6%, 99.7%, 99.8%, or 99.9% identical to the 16S rRNA sequence of a bacterial strain of Gemmiger sp. MD158. Preferably, the bacterial strain of the invention has a 16S rRNA sequence that is at least 97.5%, 98%, 98.5%, 99%, 99.5%, 99.6%, 99.7%, 99.8%, or 99.9% identical to SEQ ID NO:48. In some preferred, the bacterial strain of the invention has a 16S rRNA sequence represented by SEQ ID NO: 48.

[0355] The genome of the bacterial strain may comprise the 16S rRNA sequence set forth in SEQ ID NO: 48.

[0356] In some other embodiments, the bacterial strain of the invention is a bacterial strain of the species Gemmiger sp. MD158. By way of an example, the bacterial strain may have a chromosome with sequence identity to any one of SEQ ID NOs: 34-38. In preferred embodiments, the bacterial strain of the invention has a chromosome with at least 90% sequence identity (e.g., at least 92%, 94%, 95%, 96%, 97%, 97.5%, 98%, 98.5%, 99%, 99.5%, or 100% sequence identity) any one of SEQ ID NOs: 29-33 across at least 60% (e.g., at least 65%, 70%, 75%, 80%, 85%, 95%, 96%, 97%, 98%, 99% or 100%) of any one of SEQ ID NOs: 34-38. For example, the bacterial strain of the invention may have a chromosome with at least 90% sequence identity to any one of SEQ ID NOs: 34-38 across 70% of any one of SEQ ID NOs: 34-38, or at least 90% sequence identity to any one of SEQ ID NOs: 34-38 across 80% of any one of SEQ ID NOs: 34-38, or at least 90% sequence identity to any one of SEQ ID NOs: 34-38 across 90% of any one of SEQ ID NOs: 34-38, or at least 90% sequence identity to any one of SEQ ID NOs: 34-38 across 100% of any one of SEQ ID NOs: 29-33, or at least 95% sequence identity to any one of SEQ ID NOs: 34-38 across 70% of any one of SEQ ID NOs: 34-38, or at least 95% sequence identity to any one of SEQ ID NOs: 34-38 across 80% of any one of SEQ ID NOs: 34-38, or at least 95% sequence identity to any one of SEQ ID NOs: 34-38 across 90% of any one of SEQ ID NOs: 34-38, or at least 95% sequence identity to any one of SEQ ID NOs: 34-38 across 100% of any one of SEQ ID NOs: 34-38, or at least 98% sequence identity to any one of SEQ ID NOs: 34-38 across 70% of any one of SEQ ID NOs: 34-38, or at least 98% sequence identity to any one of SEQ ID NOs: 34-38 across 80% of any one of SEQ ID NOs: 34-38, or at least 98% sequence identity to any one of SEQ ID NOs: 34-38 across 90% of any one of SEQ ID NOs: 34-38, or at least 98% sequence identity to any one of SEQ ID NOs: 34-38 across 100% of any one of SEQ ID NOs: 34-38.

[0357] A derivative of the strains deposited under the accession number V21/011520, may be a daughter strain (progeny) or a strain cultured (subcloned) from the original. A derivative of a strain of the invention may be modified, for example at the genetic level, without ablating the biological activity. In particular, a derivative strain of the invention is therapeutically active. A derivative strain will have comparable activity to the original V21/011520 strain from which it is derived. In particular, a derivative strain will elicit comparable effects in at least one disease model (e.g., colitis) as shown in the Examples, which may be identified by using the culturing and administration protocols described in the Examples. A derivative of any one of the V21/011520 strains will generally be a biotype of the respective V21/011520 strain.

[0358] References to cells of the G. formicilis strain deposited under accession number V21/011520 include any cells that have the same safety and therapeutic efficacy characteristics as the strains deposited under accession number V21/011520, and such cells are encompassed by the invention.

### 6.1 Bacteria Biotypes

[0359] Bacterial strains that are biotypes of a bacterium deposited under accession number V21/011520 are also expected to be effective for treating or preventing inflammatory and autoimmune disorders. A biotype is a closely related strain that has the same or very similar physiological and biochemical characteristics.

[0360] Strains that are biotypes of a bacterium deposited under the accession number V21/011520 and that are suitable for use in the invention may be identified by sequencing other nucleotide sequences for a bacterium deposited under accession number V21/011520. For example, substantially the whole genome may be sequenced and a biotype strain of the invention may have at least 95%, 96%, 97%, 98%, 99%, 99.5% or 99.9% sequence identity across at least 80% of its whole genome (e.g., across at least 85%, 90%, 95% or 99%, or across its whole genome). Other suitable sequences for use in identifying biotype strains may include hsp60 or repetitive sequences such as BOX, ERIC, (GTG)5, or REP (Masco et al., 2003; Kim et al., 2019). Biotype strains may have sequences with at least 95%, 96%, 97%, 98%, 99%, 99.5% or 99.9% sequence identity to the corresponding sequence of a bacterium deposited under accession number V21/011520.

[0361] Alternatively, strains that are biotypes of a bacterium deposited under the accession number V21/011520, and restriction fragment analysis and/or PCR analysis, for example by using fluorescent amplified fragment length polymorphism (FAFLP) and repetitive DNA element (rep)-PCR fingerprinting, or protein profiling, or partial 16S or 23S rRNA sequencing. In some preferred embodiments, such techniques may be used to identify other suitable G. formicilis strains.

[0362] In certain embodiments, strains that are biotypes of a bacterium deposited under accession number V21/011520, and that are suitable for use in the invention are strains that provide the same pattern as a bacterium deposited under accession number V21/011520 when analysed by amplified ribosomal DNA restriction analysis (ARDRA), for example when using Sau3AI restriction enzyme (for exemplary methods and guidance see, for example, Sråtková et al., 2011). Alternatively, biotype strains are identified as strains that have the same carbohydrate fermentation patterns as a bacterium deposited under accession number V21/011520.

[0363] In some embodiments, bacterial strains useful in the invention may be identified by routinely profiling the production and consumption of metabolites by a bacterial strain. It is predicted that the bacterial strains described above and elsewhere herein effect production of acetate, butyrate, ethanol and fumarate. Therefore, in some embodiments, the bacterial strains of the invention induce the production in vivo of one or more of the metabolites acetate, ethanol, butyrate, and fumarate. Additionally, in some embodiments the bacterial strains of the invention do not produce butyrate.

[0364] Other Gemmiger strains that are useful in the compositions and methods of the invention, such as biotypes of a bacterium deposited under accession number V21/011520, may be identified using any appropriate method or strategy, including the assays described in the examples. For instance, strains for use in the invention may be identified by culturing in anaerobic TY or PYG media and/or administering the bacteria to the DSS-induced gut barrier function model and then assessing cytokine/chemokine levels, as described in the Examples. In particular, bacterial strains that have similar growth patterns, metabolic type and/or surface antigens to a bacterium deposited under accession number V21/011520 may be useful in the invention. A useful strain will have comparable immunomodulatory activity to the V21/011520 strain. In particular, a biotype strain will elicit comparable effects on host gut function. Furthermore, it is expected that a biotype will have a similar effect in a disease model (e.g., colitis, asthma, arthritis, multiple sclerosis and uveitis disease models) and comparable effects on cytokine/chemokine levels to the effects shown in the Examples, and which may be identified by using the culturing and administration protocols described in the Examples.

### Bacterial Strain Viability.

[0365] In preferred embodiments, the bacterial strains in the compositions of the invention are viable. In preferred embodiments, the bacterial strains in the compositions of the invention are viable and capable of partially or totally colonising the intestine. In some preferred embodiments, the bacterial strains in the compositions of the invention are live. By way of an example, the bacterial strains in the compositions of the invention have not been heat-killed. The bacteria of the invention may have immune modulatory effects that would not be exhibited by non-viable bacteria, for example because non-viable bacteria cannot produce metabolites and interact with the immune system in a different manner. The cell surface of a viable bacterium is also likely to be significantly different to a killed bacterium, in particular a heat-killed bacterium.

[0366] In some alternative embodiments, that bacteria are not viable. For example, in some embodiments the bacteria are heat-killed.

[0367] In some preferred embodiments, the bacterial strain for use in the invention is naturally-occurring. For example, the bacterial strain has been isolated from the mammalian digestive tract.

[0368] In some preferred embodiments, the bacterial strain for use in the invention has not been genetically engineered. For example, the bacterial strain has not been transformed with recombinant DNA.

### 7. Compositions—Gemmiger Species

[0369] Provided herein are compositions that comprise, consist, or consist essentially of a therapeutically effective amount of a bacterial strain or strains described above and/or elsewhere herein. In some embodiments, the bacteria in the compositions may be identified by strain, species, operational taxonomic unit (OTU), whole genome sequence, 16S rRNA sequence, or other methods known in the art for defining different types of bacteria.

### 7.1 Most Recent Common Ancestor (MRCA)

[0370] In some embodiments, the compositions comprise an effective amount of a bacterial strain that is a phylogenetic descendant of the MRCA of G. variabile and G. sp002306375 (see, FIG. 15). Preferably, the phylogenetic classification is as defined by the GTDB (Parks et al., 2018). In some embodiments, the phylogenetic classification is as defined in release 89 (r89) of the GTDB.

[0371] In some embodiments, determining if a bacterial strain is a descendant of a MRCA of G. variabile and G. sp002306375 may be performed using phylogenetic grouping procedures known in the art. In some embodiments, a rooted phylogenetic tree with G. variabile, G. sp002306375, and a third taxon of interest (e.g., a taxon to be classified) may be used, with the following the analysis packages being applied: Analyses of Phylogenetics and Evolution (“ape”; https://cran.r-project.org/web/packages/ape/index.html) and Phylogenetic Tool for Comparative Biology (“phytools”;), in order to determine whether the taxon of interest is useful for the compositions of the present invention. Both ape and phytools are packages written in the R language for use in studying molecular evolution and phylogenetics. The ape and phytools packages provide methods for phylogenetic and evolutionary analysis and their use is known to one of skill in the art. In some embodiments, the following script may be used:

library(“ape”)
library(“phytools”)
input.tree = read.tree(file=“tree_file”)
gemmi c(“s_{——}Gemmiger sp900554145”, “s_{——}Gemmiger sp004555405”)
gemmi.node = getMRCA(input.tree, gemmi)
gemmi.tree = extract.clade(input.tree, gemmi.node)
print(gemmi.tree$tip.label)

[0372] In some embodiments, after the script is run, if the taxon of interest is in the printed list, it is a descendant of a MRCA of the two species.

[0373] In other embodiments, different phylogenetic grouping methods known in the art may be used to determine if a bacterial strain is a descendant of a MRCA of G. variabile and G. sp002306375 (see, FIG. 15B,C), including methods that use different analysis packages and are based on different programming languages.

[0374] In some other embodiments, the bacterial strain is a phylogenetic descendant of the MRCA of G. variabile and G. sp003476825, together with a pharmaceutically acceptable carrier, diluent, or excipient. Suitably, the MRCA is defined at node 23819 of the bac120 phylogenetic tree from the GTDB. In some embodiments, the phylogenetic tree is created by release 89 of the GTDB, however, any suitable subsequent release is considered to give equally as appliable results.

[0375] In some other embodiments, the bacterial strain is a phylogenetic descendant of the MRCA of G. variabile and G. formicilis, together with a pharmaceutically acceptable carrier, diluent, or excipient. Suitably, the MRCA is defined at node 23820 of the bac120 phylogenetic tree from the GTDB. In some embodiments, the phylogenetic tree is created by release 89 of the GTDB, however, any suitable subsequent release is considered to give equally as appliable results.

[0376] In other embodiments, a bacterial species is a member of the family Ruminococcaceae if the species has a 16S rRNA sequence with sequence identity to 16S rRNA sequences from species already identified as a member of the family Ruminococcaceae. In some embodiments, identification of whether a bacterial species is a member of the family Ruminococcaceae is performed using the methods described in Yarza et al., 2014, Nature Reviews Microbiology 12:635-645, and Stackebrandt, E. & Ebers, J., 2006, Microbiol. Today 8:6-9, which are hereby incorporated by reference herein.

7.2 16S rRNA Sequence Identity

[0377] In some embodiments, the 16S rRNA sequence is obtained or determined for a bacterial species to be classified. This query 16S rRNA sequence is compared to 16S rRNA sequences from bacterial species already classified as members of the Gemmiger genus. In some embodiments, the query 16S rRNA sequence is compared to the 16S rRNA sequences set forth in SEQ ID NO: 27. In some embodiments, the query 16S rRNA sequence is compared to all known 16S rRNA sequences for bacterial species already classified as members of the Gemmiger genus. In other embodiments, the query 16S rRNA sequence is compared to a subset of all known 16S rRNA sequences for bacterial species already classified as members of the Gemmiger genus. A percent identity between the query sequence and the compared sequences is determined. If the percent identify of the query sequence is determined to be above a defined threshold, then the bacterial species to be classified is classified as member of the Gemmiger genus.

[0378] In some embodiments, the threshold sequence identity is 95%. In some other embodiments, the threshold sequence identity is 97.5%. In some other embodiments, the threshold sequence identity is 99.0%. In some embodiments, the threshold sequence identity is 94.5%, 94.6%, 94.7%, 94.8%, 94.9%, 95.0%, 95.1%, 95.2%, 95.3%, 95.4%, 95.5%, 95.6%, 95.7%, 95.8%, 95.9%, 96.0%, 96.1%, 96.2%, 96.3%, 96.4%, 96.5%, 96.6%, 96.7%, 96.8%, 96.9%, 97.0%, 97.1%, 97.2%, 97.3%, 97.4%, 97.5%, 97.6%, 97.7%, 97.8%, 97.9%, 98.0%, 98.1%, 98.2%, 98.3%, 98.4%, 98.5%, 98.6%, 98.7%, 98.8%, 98.9% 99.0%, 99.1%, 99.2%, 99.3%, 99.4%, 99.5% , 99.6%, 99.7%, 99.8%, 99.9% or 100%.

[0379] In some embodiments, the 16S rRNA sequence is obtained or determined for a bacterial species to be classified. This query 16S rRNA sequence is compared to 16S rRNA sequences from bacterial species already classified as members of the family Ruminococcaceae. In some embodiments, the query 16S rRNA sequence is compared to all known 16S rRNA sequences for bacterial species already classified as members of the family Ruminococcaceae. In other embodiments, the query 16S rRNA sequence is compared to a subset of all known 16S rRNA sequences for bacterial species already classified as members of the family Ruminococcaceae. A percent identity between the query sequence and the compared sequences is determined. If the percent identify of the query sequence is determined to be above a defined threshold, then the bacterial species to be classified is classified as member of the family Ruminococcaceae.

[0380] In some embodiments, the threshold sequence identity is 95%. In some embodiments, the threshold sequence identity is 98.7%. In some embodiments, the threshold sequence identity is 94.8%. In some embodiments, the threshold sequence identity is 94.5%, 94.6%, 94.7%, 94.8%, 94.9%, 95.0%, 95.1%, 95.2%, 95.3%, 95.4%, 95.5%, 95.6%, 95.7%, 95.8%, 95.9%, 96.0%, 96.1%, 96.2%, 96.3%, 96.4%, 96.5%, 96.6%, 96.7%, 96.8%, 96.9%, 97.0%, 97.1%, 97.2%, 97.3%, 97.4%, 97.5%, 97.6%, 97.7%, 97.8%, 97.9%, 98.0%, 98.1%, 98.2%, 98.3%, 98.4%, 98.5%, 98.6%, 98.7%, 98.8%, 98.9% 99.0%, 99.1%, 99.2%, 99.3%, 99.4%, 99.5%, 99.6%, 99.7%, 99.8%, 99.9% or 100%.

### 8. Functional Features of Bacterial Strains

[0381] Gut barrier dysregulation is a key pathway leading to systemic inflammation. As demonstrated in the examples, the bacterial strains of the invention, and compositions comprising said strains, are effective at enhancing gut barrier function.

[0382] All inflammatory or autoimmune disorders mediated by gut barrier dysregulation causing systemic inflammation in the subject are applicable for treatment with the bacterial strains described above and/or elsewhere herein.

### 8.1 Gut Barrier Function.

[0383] Gut barrier (also known as intestinal barrier) function regulates transport and host defense mechanisms at the mucosal interface with the outside world. Transcellular and paracellular fluxes are tightly controlled by membrane pumps, ion channels and tight junctions, adapting permeability to physiological needs.

[0384] The translocation of foreign (i.e., non-host) substances such as lipopolysaccharide (LPS) and other inflammatory compounds from the luminal side of the intestine into the circulating system is inhibited by the epithelial barrier. One of the functions of this epithelial barrier is performed by the tight junctions. Tight junctions, or zonula occludens, are the closely associated areas of two epithelial cells whose membranes join together forming a virtually impermeable barrier to fluid, thereby separating the vascular system from the lumen of the digestive tract. Disturbance at any level, but particularly bacterial translocation due to increased permeability and breakdown of oral tolerance due to compromised epithelial and T cell interaction, can result in inflammation and tissue damage. Thus, a reduction of the tight junction barrier function has been demonstrated to result in an increased translocation of undesirable substances such as LPS from intestinal lumen into the circulating system.

[0385] The present invention provides methods of restoring or improving gut barrier function in a subject, the method comprising administering to the subject a composition that comprises a bacterial strain as described above and/or elsewhere herein, to thereby restore or improve the gut barrier function in the subject. In some specific embodiments, the present invention provides methods of restoring or improving gut barrier function in a subject, the method comprising administering to the subject a composition that comprises a bacterial strain of one or more of A. shahii, C. sana, and G. formicilis, to thereby restore or improve the gut barrier function in the subject. As used in this specification, gut barrier integrity refers to a measure of gut barrier function. High gut barrier integrity can be associated with a lack of gut or intestinal permeability, wherein a high level of gut permeability is indicative of low gut barrier integrity. In a related embodiment, the invention also provides methods of maintaining healthy or normal gut barrier function. Such methods may be used to prevent gut barrier dysregulation is subjects considered to be at high risk of gut barrier dysregulation (e.g., subjects in remission of IBD). In some embodiments the composition comprises a bacterial strain of A. shahii. In some other embodiments the composition comprises a bacterial strain of C. sana. In yet some other embodiments, the composition comprises a bacterial strain of G. formicilis.

[0386] In some embodiments, at least one biomarker measured in a sample (and, in particular, a biological sample) is used to assess the change, in particular, an improvement, in the gut barrier integrity of a subject.

[0387] In some embodiments of the methods and uses provided in this specification, the composition comprising a bacterial strain of A. shahii may increase or decrease the levels of one or more biomarkers of gut barrier integrity in a sample from a subject.

[0388] In some embodiments of the methods and uses provided in this specification, the composition comprising a bacterial strain of C. sana may increase or decrease the levels of one or more biomarkers of gut barrier integrity in a sample from a subject.

[0389] Furthermore, in some embodiments of the methods and uses provided in this specification, the composition comprising a bacterial strain of G. formicilis may increase or decrease the levels of one or more biomarkers of gut barrier integrity in a sample from a subject.

[0390] In some embodiments, depending on the particular biomarker, either an increase or a decrease in the level of the marker is indicative of an increase in gut barrier integrity and/or a decrease in gut permeability. In some embodiments, the biomarker is selected from a cytokine, chemokine, growth factor, angiogenic factor, enzyme, protease, adhesion molecule, cell signalling molecule, hormone or sugar. In some embodiments, the biomarker comprises a cytokine. In some embodiments, the marker comprises a chemokine. In some embodiments, the marker comprises a growth factor. In some embodiments, the marker comprises an angiogenic factor. In some embodiments, the marker comprises an enzyme. In some embodiments, the marker comprises a protease. In some embodiments, the marker comprises an adhesion molecule. In some embodiments, the marker comprises a cell signalling molecule. In some embodiments, the marker comprises a hormone. In some embodiments, the marker comprises a sugar.

[0391] This specification provides assays for biomarkers of intestinal permeability. Biological samples from the subject such as blood (plasma, or serum) or tissue may be used to measure levels of any suitable biomarker including one or more of LPS, lipopolysaccharide binding protein (LPSBP), intestinal fatty acid binding protein (IFABP), Zonulin, bacterial and/or 16S rRNA, but is not limited to these markers. LPS, I-FABP and Zonulin may be measured by enzyme-linked immunosorbent assay (“ELISA”). Techniques and kits for ELISA are well known to those in the art. In some embodiments, elevated LPS, I-FABP and/or Zonulin, when compared to a control in blood, serum, saliva, urine and/or plasma, is used as an indicator of increased intestinal permeability, and, thus, lower gut barrier integrity.

[0392] LPSBP may also be measured by ELISA. In some embodiments, significant changes in LPSBP either higher or lower, when compared to a control, may be used as an indicator of increased intestinal permeability and can confirm a reduced gut barrier integrity.

[0393] In some embodiments, increases in bacterial 16S rRNA is used as an indicator of increased intestinal permeability, and, therefore, a reduction in gut barrier integrity. Bacterial 16S rRNA may be purified from blood, serum, organ tissue or urine using standard nucleic acid isolation protocols. These are, for example, commercially available. The isolated nucleic acids may be detected by qPCR amplification using primers specific for bacterial 16S rRNA sequences or amplification using primers specific for bacterial 16S rRNA and sequencing the resultant amplicons.

[0394] Tight junction proteins that are expressed by the intestinal epithelial cells and regulate intestinal permeability may also be used as biomarkers of intestinal permeability. In some embodiments, tight junction proteins are assayed to determine alterations in intestinal permeability and gut barrier integrity. In some embodiments, the proteins measured may include, but are not limited to, claudins, occludin, ZO-1, and E-cadherin (adherens junction) proteins. Other tight junction proteins may also be assayed. In some embodiments, the tight junction proteins are measured using an immunohistochemical stain. In some embodiments, the tight junction proteins are measured using ELISA.

[0395] In some embodiments, plasma citrulline is assayed to determine alterations in intestinal permeability and gut barrier integrity. A reduction in plasma citrulline levels corresponds to a loss in epithelial cell mass indicating an increase in gut barrier permeability.

[0396] In some embodiments, the method includes oral administration of an insoluble sugar such as sucralose, collection of a bodily fluid such as urine or blood after one or more defined periods of time, and measurement of the insoluble sugar contained in the bodily fluid through standard clinical analytical techniques. The insoluble sugars may include, but are not limited to, mannitol, lactulose, sucrose, sucralose and combinations of any of the foregoing.

[0397] In some embodiments, gut barrier integrity is measured using an in vitro assay. A particularly preferred in vitro assay suitable for measuring gut barrier function is by trans-epithelial electrical resistance (TEER). Such assays are well known in the field (e.g., Srinivasan, 2015; and Lea, 2015).

### 8.2 Mucosal Healing

[0398] Mucosal healing has become an important endpoint to assess the therapeutic effect in inflammatory and autoimmune disorders. The definition of full mucosal healing currently used in IBD (e.g., CD and UC) clinical trials is the “complete absence of all inflammatory and ulcerative lesions”, but this definition lacks validation and does not include mucosal improvement and grading of mucosal healing.

[0399] Mucosal healing is predominantly defined by endoscopic assessment of intestinal inflammation. In order to evaluate the presence or absence of mucosal healing on endoscopy, various endoscopic scoring systems have been developed. These indices allow for the determination of improvements of endoscopic lesions, even when the rather rigid endpoint of mucosal healing and thereby the total disappearance of all mucosal ulcerations is not met. The endoscopic component of the clinical Mayo score, introduced in 1987, is currently the most used score of the mucosal layer in clinical practice (see, Schroeder et al., 1987). It includes the variables erythema, loss of vascular pattern, friability, bleeding, erosions and ulcers, and ranges from 0 to 3. Mucosal healing is classically considered to be a score of 0 (normal mucosa) or 1 (mucosal erythema, decreased vascular pattern, mild friability) (D′Haens, 2007).

[0400] In some other embodiments, mucosal healing is determined to have occurred when the patient is determined to have an endoscopy sub-score of 0 or 1 as assessed by flexible sigmoidoscopy. In certain such embodiments, patients who experience mucosal healing are determined to have an endoscopy sub-score of 0.

[0401] Both corticosteroids and aminosalicylates have been used for decades and are among the most commonly prescribed drugs for repairing the mucous layer (e.g., in patients with UC) (Carvalho and Cotter, 2017). The mechanisms through which they reduce mucosal inflammation include controlling nuclear factor (NF)-kB expression and inflammatory cytokines (directly modulating cell migration and proliferation of epithelial cell lines). Anti-TNF drugs (e.g., infliximab, adalimumab, and golimumuab) act at several steps of mucosal injury, restricting the inflammatory infiltrate and T cell proliferation within the lamina propria (Baert, 1999), and downregulating the expression of metalloproteinases and proinflammatory molecules (Baert, 1999). They also act on the regenerative process, restoring the protective capabilities of the mucosa by reinforcing intestinal permeability and mucosal secretion, activating fibroblasts, and maintaining epithelial regeneration (Suenaert, 2002).

[0402] Other measures of assessing mucosal healing are well known in the art, including the measurement of biomarkers C-reactive protein and calprotectin. An advantage of using in vitro biomarker assays for the assessment of mucosal healing is that such assays are typically far less invasive for the subject. Histopathology is another measure of inflammation, which has been cited as being particularly informative for mucosal healing.

### 8.3 STAT3 Signalling Pathway

[0403] Cytokine pathways mediate a broad range of biological functions, including many aspects of inflammation and immunity. The Janus kinases (JAK), including JAK1, JAK2, JAK3 and tyrosine kinase 2 (TYK2), are cytoplasmic tyrosine kinases that associate with type I and type II cytokine receptors and regulate cytokine signal transduction. Cytokine engagement with cognate receptors triggers activation of receptor associated JAKs and this leads to JAK-mediated tyrosine phosphorylation of signal transducer and activator of transcription (STAT) proteins and ultimately transcriptional activation of specific gene sets (Schindler et al., 2007, J. Biol. Chem. 282: 20059-63). Cytokine receptors are typically functional as heterodimers, and as a result, more than one type of JAK kinase is usually associated with a cytokine receptor complex. The specific JAKs associated with different cytokine receptor complexes have been determined in many cases through genetic studies and corroborated by other experimental evidence.

[0404] STAT3 plays an important role in the activation of several autoimmune and inflammatory disorders, including IBD. The bacterial strains of the present invention significantly suppress IL-23-mediated STAT3 activation. Thus, the present invention provides methods of suppressing or otherwise inhibiting STAT3 signalling in a subject (i.e., IL-23-mediated STAT3 signalling), the method comprising administering to the subject a composition that comprises bacterial strain as described above and/or elsewhere herein. Accordingly, in some embodiments the bacterial strains described herein directly or indirectly suppress STAT3 activity. In some embodiments, the strain of A. shahii produces a bioactive molecule that binds directly to a STAT3 polypeptide. In some alternative embodiments, the bacterial strain is an indirect inhibitor of STAT3 activation, for example, by binding to a molecule upstream of STAT3 in the IL-23-mediated STAT3 signalling pathway, or by binding to a molecule that regulates STAT3 activity (e.g., ubiquitination). By way of an illustrative example, the bioactive agent may directly bind or antagonize any one of IL23, JAK2, or TYK2 in order to suppress the IL-23-mediated STAT3 signalling pathway.

### 8.4 Th17 Inflammatory Response

[0405] Some bacterial compositions of the invention are effective for reducing the Th17 inflammatory response. In particular, treatment with the compositions described above and elsewhere herein may modulate Th17 pathway cytokines (including TNF, IL-22, IL-21, and IL-17), and result in clinical improvements in animal models of conditions mediated by the Th17 pathway. Therefore, the compositions of the invention may be useful for treating or preventing inflammatory and autoimmune disorders, and in some embodiments, diseases or conditions mediated by Th17. In particular, the compositions of the invention may be useful for reducing or preventing elevation of the Th17 inflammatory response.

[0406] Th17 cells are a subset of T helper cells that produce, among other cytokines, IL17A, IL17F, IL-21 and IL-22. Th17 cell differentiation may be driven by IL-23. These cytokines and others form important parts of the Th17 pathway, which is a well-established inflammatory signalling pathway that contributes to and underlies a number of inflammatory and autoimmune disorders (as described in, for example, Ye, 2015; Fabro, 2015; Yin, 2014; Cheluvappa, 2014; Schieck, 2014; Balato, 2014). Some diseases that are mediated by Th17 can be ameliorated or alleviated by repressing the Th17 pathway, which may be through a reduction in the differentiation of Th17 cells or a reduction in their activity or a reduction in the level of Th17 pathway cytokines. Diseases mediated by the Th17 pathway may be characterised by increased levels of cytokines produced by Th17 cells, such as IL-17A, IL-17F, IL-21, IL-22, IL-26, IL-9 (reviewed in Monteleone, 2011). Diseases mediated by the Th17 pathway may be characterised by increased expression of Th17-related genes, such as STAT3 or IL-23 receptor. Diseases mediated by the Th17 pathway may be associated with increased levels of Th17 cells.

[0407] IL-17 is a key cytokine that links T cells activation to neutrophil activation and mobilization, hence IL-17 plays a pivotal role in innate immunity. However, due to its role in neutrophil activation, can contribute to inflammatory autoimmune diseases such as inflammatory bowel disease, psoriasis, and rheumatoid arthritis. IL-17 as used herein may refer to any member of the IL-17 family, including IL-17A, IL-17B, IL-17C, IL-17D, IL-17E, and IL-17F. IL-17-mediated diseases and conditions are characterised by high expression of IL-17 and/or the accumulation, or presence of IL-17-positive cells in a tissue affected by the disease or condition. Similarly, IL-17-mediated diseases and conditions are diseases and conditions that are exacerbated by high IL-17 levels or an increase in IL-17 levels, and that are alleviated by low IL-17 levels or a reduction in IL-17 levels. The IL-17 inflammatory response may be local or systemic.

[0408] Examples of diseases and conditions that may be mediated by the Th17 pathway include (but are not limited to) inflammatory bowel disease (such as Crohn's disease and ulcerative colitis); multiple sclerosis; arthritis (such as rheumatoid arthritis, osteoarthritis, psoriatic arthritis, and juvenile idiopathic arthritis); neuromyelitis optica (Devic's disease); ankylosing spondylitis; spondyloarthritis; psoriasis; systemic lupus erythematosus; celiac disease; asthma (such as allergic asthma or neutrophilic asthma); chronic obstructive pulmonary disease (COPD); cancer (such as breast cancer, colon cancer, lung cancer or ovarian cancer); uveitis; scleritis; vasculitis; Behcet's disease; atherosclerosis; atopic dermatitis; emphysema; periodontitis; allergic rhinitis; and allograft rejection. Accordingly, in some aspects the present invention provides methods for treating or preventing one or more of these conditions or diseases, by administering a composition as described above and/or elsewhere herein. In further preferred embodiments, these conditions or diseases are mediated by the STAT3 signalling pathway. In further preferred embodiments, these conditions or diseases are mediated through the Th17 pathway.

[0409] In certain embodiments, the present invention provides methods compositions of the invention are for use in a method of reducing Th17 cell differentiation in the treatment or prevention of a disease or condition mediated by the Th17 pathway. In certain embodiments, the compositions of the invention are for use in treating or preventing an inflammatory or autoimmune disorder, wherein said treatment or prevention is achieved by reducing or preventing elevation of the Th17 inflammatory response. In certain embodiments, the compositions of the invention are for use in treating a patient with an inflammatory or autoimmune disorder, wherein the patient has elevated IL-17 levels or elevated Th17 cells or is exhibiting a Th17 inflammatory response. In certain embodiments, the patient may have been diagnosed with a chronic inflammatory or autoimmune disorder or condition, or the composition of the invention may be for use in preventing an inflammatory or autoimmune disorder or condition developing into a chronic inflammatory or autoimmune disorder or condition. In certain embodiments, the disease or condition may not be responsive to treatment with TNF inhibitors. These uses of the invention may be applied to any of the specific disease or conditions listed in the preceding paragraph.

[0410] The Th17 pathway are often associated with chronic inflammatory and autoimmune disorders, so the compositions of the invention may be particularly useful for treating or preventing chronic diseases or conditions as listed above. In certain embodiments, the compositions are for use in patients with chronic disease. In certain embodiments, the compositions are for use in preventing the development of chronic disease.

[0411] The compositions of the invention may be useful for treating diseases and conditions mediated by the Th17 pathway and for addressing the Th17 inflammatory response, so the compositions of the invention may be particularly useful for treating or preventing chronic disease, treating or preventing disease in patients that have not responded to other therapies (such as treatment with TNF inhibitors), and/or treating or preventing the tissue damage and symptoms associated with Th17 cells. For example, IL-17 is known to activate matrix destruction in cartilage and bone tissue and IL-17 has an inhibitory effect on matrix production in chondrocytes and osteoblasts, so the compositions of the invention may be useful for treating or preventing bone erosion or cartilage damage.

[0412] In certain embodiments, treatment with compositions of the invention provides a reduction or prevents an elevation in IL-17 levels, in particular IL-17A levels. In certain embodiments, treatment with compositions of the invention provides a reduction or prevents an elevation in IFN-γ or IL-6 levels. Such reduction or prevention of elevated levels of these cytokines may be useful for treating or preventing inflammatory and autoimmune disorders and conditions, in particular those mediated by the Th17 pathway.

### 8.5 Th1 Inflammatory Response

[0413] CD4⁺ T cells play an important role in inflammatory disease/disorder pathogenesis, with many subsets of CD4⁺ T cells having been identified as drivers in perpetuating chronic intestinal inflammation (see, Imam et al., 2018). For example, T helper type 1 (Th1) cells accumulate in the intestinal tract of individuals with IBD, and are directly associated with disease. Interferon-γ (IFN-γ) is the defining cytokine produced by Th1 cells. During intestinal inflammation IFN-γ in combination with TNF is proposed to drive intestinal epithelial cell $-catenin signalling and limit their differentiation and proliferation (Imam et al., 2018).

### 9. Methods of Treatment

[0414] In some embodiments, the present invention provides methods of treating or preventing an inflammatory or autoimmune disorder in a subject, the methods comprising administering to the subject a bacterial strain as described above and/or elsewhere herein.

[0415] Suitably, the inflammatory or autoimmune disorder is selected from the group comprising: an inflammatory bowel disease (such as Crohn's disease or ulcerative colitis); asthma (such as allergic asthma or neutrophilic asthma); arthritis (such as rheumatoid arthritis, osteoarthritis, psoriatic arthritis, or juvenile idiopathic arthritis); fatty liver disease (such as nonalcoholic fatty liver disease (NAFLD)); ankylosing spondylitis; psoriasis; systemic lupus erythematosus (SLE); scleroderma; Sjogren's syndrome; vasculitis; and type 1 diabetes mellitus.

### 9.1 Inflammatory Bowel Disease (IBD)

[0416] The examples demonstrate that the compositions of the invention have a beneficial restorative effect on gut barrier function and that they also have anti-inflammatory properties, and so they may be useful in the treatment of IBD.

[0417] Accordingly, in some embodiments the invention provides a composition comprising a bacterial strain of the genus Alistipes for use in a method of treating or preventing an inflammatory bowel disease. The inventors have identified that treatment with Alistipes strains reduces severity of colitis in a mouse model of disease. Thus, the compositions of the invention may be useful in the treatment of inflammatory diseases. In some embodiments, the compositions of the invention are for use in the treatment or prevention of an IBD. In some embodiments, the invention provides methods of treating or preventing ulcerative colitis. In some embodiments, the invention provides methods of treating or preventing of Crohn's disease. In certain embodiments, the invention provides methods of treating or preventing ulcerations and/or bleeding in the treatment of an IBD, in particular in the treatment of colitis and ulcerative colitis. In preferred embodiments, the invention provides a method of treating or preventing IBD in a subject, the method comprising administering to the subject a composition comprising a bacterial strain of the species A. shahii. In further preferred embodiments, the invention provides a method of treating or preventing colitis, (particularly ulcerative colitis) in a subject, the method comprising administering to the subject a composition comprising a bacterial strain of the species A. shahii. In further preferred embodiments, the invention provided methods of reducing at least one side effect of colitis (particularly ulcerative colitis), including ulcerations and/or bleeding.

[0418] In addition, in some embodiments the invention provides a composition comprising a bacterial strain of the genus Colonithrix for use in a method of treating or preventing an inflammatory bowel disease. The inventors have identified that treatment with Colonithrix strains reduces severity of colitis in a mouse model of disease. Thus, the compositions of the invention may be useful in the treatment of inflammatory diseases. In some embodiments, the compositions of the invention are for use in the treatment or prevention of an IBD. In some embodiments, the invention provides methods of treating or preventing ulcerative colitis. In some embodiments, the invention provides methods of treating or preventing of Crohn's disease. In certain embodiments, the invention provides methods of treating or preventing ulcerations and/or bleeding in the treatment of an IBD, in particular in the treatment of colitis and ulcerative colitis. In preferred embodiments, the invention provides a method of treating or preventing IBD in a subject, the method comprising administering to the subject a composition comprising a bacterial strain of the species C. sana. In further preferred embodiments, the invention provides a method of treating or preventing colitis, (particularly ulcerative colitis) in a subject, the method comprising administering to the subject a composition comprising a bacterial strain of the species C. sana. In further preferred embodiments, the invention provided methods of reducing at least one side effect of colitis (particularly ulcerative colitis), including ulcerations and/or bleeding.

[0419] Furthermore, in some embodiments the invention provides a composition comprising a bacterial strain of the genus Gemmiger for use in a method of treating or preventing an inflammatory bowel disease. The inventors have identified that treatment with Gemmiger strains reduces severity of colitis in a mouse model of disease. Thus, the compositions of the invention may be useful in the treatment of inflammatory diseases. In some embodiments, the compositions of the invention are for use in the treatment or prevention of an IBD. In some embodiments, the invention provides methods of treating or preventing ulcerative colitis. In some embodiments, the invention provides methods of treating or preventing of Crohn's disease. In certain embodiments, the invention provides methods of treating or preventing ulcerations and/or bleeding in the treatment of an IBD, in particular in the treatment of colitis and ulcerative colitis. In preferred embodiments, the invention provides a method of treating or preventing IBD in a subject, the method comprising administering to the subject a composition comprising a bacterial strain of the species G. formicilis. In further preferred embodiments, the invention provides a method of treating or preventing colitis, (particularly ulcerative colitis) in a subject, the method comprising administering to the subject a composition comprising a bacterial strain of the species G. formicilis. In further preferred embodiments, the invention provided methods of reducing at least one side effect of colitis (particularly ulcerative colitis), including ulcerations and/or bleeding.

[0420] IBD is a complex disease that can be caused by multiple environmental and genetic factors. Factors contributing to the onset of IBD include diet, microbiota, intestinal permeability, and genetic susceptibility to increased inflammatory response to gut infection. Symptoms of inflammatory bowel disease include abdominal pain, vomiting, diarrhea, rectal bleeding, severe internal cramps/muscle spasms in the pelvic region, weight loss and anaemia. In certain embodiments, the compositions are for use in reducing one or more symptoms associated with IBD. In certain embodiments, the compositions of the invention are for use in preventing one or more symptoms of IBD.

[0421] IBD may accompany other diseases or conditions, such as cardiovascular disease, neuropsychological disorders, and metabolic syndrome. In certain embodiments, the compositions of the invention are for use in the treatment or prevention of one or more diseases or conditions that accompany IBD.

[0422] IBD is generally diagnosed by biopsy or colonoscopy. Measurements of faecal calprotectin is useful for the preliminary diagnosis of IBD. Other laboratory test for the diagnosis of IBD include, complete blood count, erythrocyte sedimentation rate, comprehensive metabolic panel, faecal occult blood test or C-reactive protein test. Typically, a combination of laboratory testing and biopsy/colonoscopy will be used to confirm diagnosis of IBD. In certain embodiments, the compositions of the invention are for use in a subject diagnosed with IBD.

[0423] In certain embodiments the IBD is Crohn's disease and/or ulcerative colitis. As broadly described above, studies have shown that several inflammatory cytokines are upregulated in the inflammatory mucosa of patients with Crohn's disease and ulcerative colitis, including but not limited to STAT3 signalling and NFκB signalling pathway-mediated cytokines (e.g., IL-17, TNF, IL-21, IL-22). Therefore, inhibition of STAT3 signalling pathway-mediated cytokine activity and/or NFκB signalling pathway-mediated cytokines may be useful in the treatment of Crohn's disease and ulcerative colitis. In certain embodiments, the compositions of the invention are for use in the treatment or prevention of Crohn's disease and/or ulcerative colitis.

[0424] Crohn's disease and ulcerative colitis are complex diseases with an array of probable causes, including genetic risk factors, diet, other lifestyle factors, such as smoking and alcohol consumption, and microbiome composition. Crohn's disease can manifest anywhere along the GI tract, whereas ulcerative colitis is typically prevalent in the large intestine and colon.

[0425] Gastrointestinal symptoms of IBD range from mild to severe and include abdominal pain, diarrhea, faecal blood, ileitis, increased bowel movements, increased flatulence, intestinal stenosis, vomiting, and perianal discomfort. The compositions of the invention may be for use in the treatment of prevention of one or more gastrointestinal symptoms of Crohn's disease and/or ulcerative colitis.

[0426] Systemic symptoms of Crohn's disease and ulcerative colitis include growth defects, such as the inability to maintain growth during puberty, decreased appetite, fever and weight loss. Extra-intestinal features of Crohn's disease include uveitis, photobia, episcleritis, gall stones, seronegative spondyloarthropathy, arthritis, enthesitis, erythema nodosum, pyoderma gangrenosum, deep venous thrombosis, pulmonary embolism, autoimmune haemolytic anaemia, clubbing and osteoporosis. Extra-intestinal features are additional conditions associated with Crohn's disease and/or ulcerative colitis that manifest outside the GI tract. Subjects with Crohn's disease also exhibit increased susceptibility to neurological complications such as seizures, strokes, myopathy, peripheral neuropathy, headache and depression. In certain embodiments, the compositions of the invention are for use in the treatment or prevention of one or more systemic symptoms of Crohn's disease and/or ulcerative colitis. In certain embodiments, the compositions of the invention are for use in the treatment or prevention of one or more extra-intestinal features of Crohn's disease and/or ulcerative colitis.

[0427] The diagnosis of Crohn's disease and ulcerative colitis usually involves carrying out multiple tests and surgical procedures, such as gastroscopy and/or colonoscopy and biopsy, typically of the ileum, radiologic tests, complete blood counts, C-reactive protein tests and erythrocyte sedimentation rates. In certain embodiments, the compositions of the invention are for use in subjects diagnosed with Crohn's disease or ulcerative colitis. In some embodiments, compositions of the invention are for use in treating a subject who has been diagnosed with Crohn's disease or ulcerative colitis.

[0428] Crohn's disease and ulcerative colitis are classified depending on the extent of the region of the GI tract affected (Gasche et al., 2000). A Crohn's disease of both the ileum and colon is classified as Ileocolic Crohn's. In some embodiments, the compositions are for use in the treatment or prevention of Ileocolic Crohn's. In some embodiments, the compositions are for use in a subject diagnosed with Ileocolic Crohn's/Crohn's ileitis is classified if only the ileum is affected. Crohn's colitis is classified if only the colon is affected. In certain embodiments, the compositions are for use in the treatment or prevention of Crohn's ileitis. In some embodiments, the compositions are for use in a subject diagnosed with Crohn's ileitis. In certain embodiments, the compositions are for use in the treatment or prevention of Crohn's colitis. In some embodiments, the compositions are for use in a subject diagnosed with Crohn's colitis.

[0429] Crohn's disease and ulcerative colitis may be treated with a number of therapeutic agents, such as corticosteroids, such as prednisone, immunosuppressive agents, such as azathioprine, or biologics, such as infliximab, adalimumab, and golimumab, vedolizumab and etrolizumab. In certain embodiments, the compositions of the invention are for use in the treatment or prevention of Crohn's disease or ulcerative colitis in combination with an additional therapeutic agent, including but not limited to those listed above. In certain embodiments, the additional therapeutic agent is for use in the treatment or prevention of Crohn's disease and/or ulcerative colitis.

### 9.2 Autoimmune Disorders

[0430] In humans, signs of intestinal inflammation are detectable before the clinical onset of many autoimmune disorders, such as type 1 diabetes (TiD) (Bosi, 2006). Similarly, augmented gut permeability appears before the development of insulitis in diabetes-prone rats in comparison with diabetes-resistant rats (Meddings, 1999; Neu, 2005). Those findings indicate that the breakage of gut barrier integrity with subsequent increased antigen trafficking and occurrence of low-grade intestinal inflammation precede the onset of TiD and are directly related to its pathogenesis, rather than secondary to diabetes-induced metabolic alterations (i.e., hyperglycemia). The gastrointestinal barrier is a fundamental gatekeeper to avoid the contact between luminal content and the human body. The barrier is composed of a mucus layer and an intestinal epithelial barrier (IEB), and both are crucial to prevent the passage of commensal bacteria, pathogens, and food antigens from the lumen into the gut tissue and systemic circulation. The IEB is a single layer of epithelial cells held together by a complex junctional system composed of tight junctional adhesion molecules (JAMs), tricellulin, and angulins whose interaction between themselves and with intracellular scaffolding proteins, i.e., zonula occludens proteins (ZOs), is fundamental to maintain tight junction integrity and control paracellular trafficking. In patients and rat models of TiD alterations of the IEB have been reported in association with gut inflammation (Meddings, 1999; Sapone, 2006). Furthermore, the importance of the gut mucus layer, an important gut barrier containing immunoregulatory molecules such as antimicrobial peptides and mucins, has recently been reported (see, Sorini et al., 2019).

[0431] In some embodiments, bacterial strains from the species A. shahii may provide therapeutic benefits in the treatment or prevention of asthma, such as allergic asthma or neutrophilic asthma. In certain embodiments, the compositions of the invention are for use in the treatment or prevention of asthma in a subject. In certain embodiments, the invention provides a composition comprising a bacterial strain of the species A. shahii for use in the treatment or prevention of asthma.

[0432] In some embodiments, bacterial strains from the species A. shahii may provide therapeutic benefits in the treatment or prevention of GVHD. In certain embodiments, the compositions of the invention are for use in the treatment or prevention of GVHD in a subject. In preferred embodiments, the invention provides a composition comprising a bacterial strain of the species A. shahii for use in the treatment or prevention of GVHD.

[0433] In some embodiments, bacterial strains from the species A. shahii may provide therapeutic benefits in the treatment or prevention of arthritis, such as rheumatoid arthritis, osteoarthritis, psoriatic arthritis, or juvenile idiopathic arthritis. In certain embodiments, the compositions of the invention are for use in the treatment or prevention of arthritis in a subject. In certain embodiments, the invention provides a composition comprising a bacterial strain of the species A. shahii for use in the treatment or prevention of arthritis.

[0434] In some embodiments, bacterial strains from the species A. shahii may provide therapeutic benefits in the treatment or prevention of multiple sclerosis. In certain embodiments, the compositions of the invention are for use in the treatment or prevention of multiple sclerosis in a subject. In certain embodiments, the invention provides a composition comprising a bacterial strain of the species A. shahii for use in the treatment or prevention of multiple sclerosis.

[0435] In some embodiments, bacterial strains from the species A. shahii may provide therapeutic benefits in the treatment or prevention of psoriasis. In certain embodiments, the compositions of the invention are for use in the treatment or prevention of psoriasis in a subject. In certain embodiments, the invention provides a composition comprising a bacterial strain of the species A. shahii or use in the treatment or prevention of psoriasis.

[0436] In some embodiments, bacterial strains from the species A. shahii may provide therapeutic benefits in the treatment or prevention of systemic lupus erythematosus (SLE). In certain embodiments, the compositions of the invention are for use in the treatment or prevention of SLE in a subject. In certain embodiments, the invention provides a composition comprising a bacterial strain of the species A. shahii for use in the treatment or prevention of SLE.

[0437] In some embodiments, bacterial strains from the species A. shahii may provide therapeutic benefits in the treatment or prevention of allograft rejection. In certain embodiments, the compositions of the invention are for use in the treatment or prevention of allograft rejection in a subject. In certain embodiments, the invention provides a composition comprising a bacterial strain of the species A. shahii for use in the treatment or prevention of allograft rejection.

[0438] In some embodiments, bacterial strains from the species C. sana may provide therapeutic benefits in the treatment or prevention of asthma, such as allergic asthma or neutrophilic asthma. In certain embodiments, the compositions of the invention are for use in the treatment or prevention of asthma in a subject. In certain embodiments, the invention provides a composition comprising a bacterial strain of the species C. sana for use in the treatment or prevention of asthma.

[0439] In some embodiments, bacterial strains from the species C. sana may provide therapeutic benefits in the treatment or prevention of GVHD. In certain embodiments, the compositions of the invention are for use in the treatment or prevention of GVHD in a subject. In preferred embodiments, the invention provides a composition comprising a bacterial strain of the species C. sana for use in the treatment or prevention of GVHD.

[0440] In some embodiments, bacterial strains from the species C. sana may provide therapeutic benefits in the treatment or prevention of arthritis, such as rheumatoid arthritis, osteoarthritis, psoriatic arthritis, or juvenile idiopathic arthritis. In certain embodiments, the compositions of the invention are for use in the treatment or prevention of arthritis in a subject. In certain embodiments, the invention provides a composition comprising a bacterial strain of the species C. sana for use in the treatment or prevention of arthritis.

[0441] In some embodiments, bacterial strains from the species C. sana may provide therapeutic benefits in the treatment or prevention of multiple sclerosis. In certain embodiments, the compositions of the invention are for use in the treatment or prevention of multiple sclerosis in a subject. In certain embodiments, the invention provides a composition comprising a bacterial strain of the species C. sana for use in the treatment or prevention of multiple sclerosis.

[0442] In some embodiments, bacterial strains from the species C. sana may provide therapeutic benefits in the treatment or prevention of psoriasis. In certain embodiments, the compositions of the invention are for use in the treatment or prevention of psoriasis in a subject. In certain embodiments, the invention provides a composition comprising a bacterial strain of the species C. sana or use in the treatment or prevention of psoriasis.

[0443] In some embodiments, bacterial strains from the species C. sana may provide therapeutic benefits in the treatment or prevention of systemic lupus erythematosus (SLE). In certain embodiments, the compositions of the invention are for use in the treatment or prevention of SLE in a subject. In certain embodiments, the invention provides a composition comprising a bacterial strain of the species C. sana for use in the treatment or prevention of SLE.

[0444] In some other embodiments, bacterial strains from the species C. sana may provide therapeutic benefits in the treatment or prevention of allograft rejection. In certain embodiments, the compositions of the invention are for use in the treatment or prevention of allograft rejection in a subject. In certain embodiments, the invention provides a composition comprising a bacterial strain of the species C. sana for use in the treatment or prevention of allograft rejection.

[0445] In some embodiments, bacterial strains from the species G. formicilis may provide therapeutic benefits in the treatment or prevention of asthma, such as allergic asthma or neutrophilic asthma. In certain embodiments, the compositions of the invention are for use in the treatment or prevention of asthma in a subject. In certain embodiments, the invention provides a composition comprising a bacterial strain of the species G. formicilis for use in the treatment or prevention of asthma.

[0446] In some embodiments, bacterial strains from the species G. formicilis may provide therapeutic benefits in the treatment or prevention of GVHD. In certain embodiments, the compositions of the invention are for use in the treatment or prevention of GVHD in a subject. In preferred embodiments, the invention provides a composition comprising a bacterial strain of the species G. formicilis for use in the treatment or prevention of GVHD.

[0447] In some embodiments, bacterial strains from the species G. formicilis may provide therapeutic benefits in the treatment or prevention of arthritis, such as rheumatoid arthritis, osteoarthritis, psoriatic arthritis, or juvenile idiopathic arthritis. In certain embodiments, the compositions of the invention are for use in the treatment or prevention of arthritis in a subject. In certain embodiments, the invention provides a composition comprising a bacterial strain of the species G. formicilis for use in the treatment or prevention of arthritis.

[0448] In some embodiments, bacterial strains from the species G. formicilis may provide therapeutic benefits in the treatment or prevention of multiple sclerosis. In certain embodiments, the compositions of the invention are for use in the treatment or prevention of multiple sclerosis in a subject. In certain embodiments, the invention provides a composition comprising a bacterial strain of the species G. formicilis for use in the treatment or prevention of multiple sclerosis.

[0449] In some embodiments, bacterial strains from the species G. formicilis may provide therapeutic benefits in the treatment or prevention of psoriasis. In certain embodiments, the compositions of the invention are for use in the treatment or prevention of psoriasis in a subject. In certain embodiments, the invention provides a composition comprising a bacterial strain of the species G. formicilis or use in the treatment or prevention of psoriasis.

[0450] In some embodiments, bacterial strains from the species G. formicilis may provide therapeutic benefits in the treatment or prevention of systemic lupus erythematosus (SLE). In certain embodiments, the compositions of the invention are for use in the treatment or prevention of SLE in a subject. In certain embodiments, the invention provides a composition comprising a bacterial strain of the species G. formicilis for use in the treatment or prevention of SLE.

[0451] In some other embodiments, bacterial strains from the species G. formicilis may provide therapeutic benefits in the treatment or prevention of allograft rejection. In certain embodiments, the compositions of the invention are for use in the treatment or prevention of allograft rejection in a subject. In certain other embodiments, the invention provides a composition comprising a bacterial strain of the species G. formicilis for use in the treatment or prevention of allograft rejection.

### 10. Formulations

[0452] In some embodiments, the compositions of the invention comprises fewer than 40 different bacterial strains. In some embodiments, the composition comprises fewer than 30 different bacterial strains. In some embodiments, the composition comprises fewer than 20 different bacterial strains. In some embodiments, the composition comprises fewer than 10 different bacterial strains. In some embodiments, the composition comprises fewer than 5 different bacterial strains. In some preferred embodiments, the composition comprises fewer than 3 different bacterial strains. In some preferred embodiments, the composition comprises a single bacterial strain. In some embodiments, the composition does not comprise bacteria of the genus Clostridium. In some of the same embodiments and some other embodiments, the composition does not comprise bacteria of the species Alistipes senegalensis.

[0453] The compositions of the invention comprise bacteria (i.e., live bacteria and/or killed bacteria). In preferred embodiments of the invention, the composition is formulated in freeze-dried form. The composition of the invention may comprise granules or gelatin capsules, for example hard gelatin capsules, comprising a bacterial strain of the invention. Preferably, the composition of the invention comprises lyophilised bacteria. Lyophilisation of bacteria is a well-established procedure and relevant guidance is available in, for example, references (Miyamoto-Shinohara, 2008; and Day & Stacey, 2007).

[0454] The composition of the invention may comprise a live, active bacterial culture. The examples demonstrate that cultures of the bacteria of the invention are therapeutically effective.

[0455] In some embodiments, the bacterial strain in the composition of the invention has not been inactivated, for example, has not been heat-inactivated. In some embodiments, the bacterial strain in the composition of the invention has not been killed, for example, has not been heat-killed. In some embodiments, the bacterial strain in the composition of the invention has not been attenuated, for example, has not been heat-attenuated. For example, in some embodiments, the bacterial strain in the composition of the invention has not been killed, inactivated and/or attenuated. For example, in some embodiments, the bacterial strain in the composition of the invention is live. For example, in some embodiments, the bacterial strain in the composition of the invention is viable. For example, in some embodiments, the bacterial strain in the composition of the invention is capable of partially or totally colonising the intestine. For example, in some embodiments, the bacterial strain in the composition of the invention is viable and capable of partially or totally colonising the intestine.

[0456] In some embodiments, the composition comprises a mixture of live bacterial strains and bacterial strains that have been killed. In preferred embodiments, the composition of the invention is encapsulated to enable delivery of the bacterial strain to the intestine. Encapsulation protects the composition from degradation until delivery at the target location through, for example, rupturing with chemical or physical stimuli such as pressure, enzymatic activity, or physical disintegration, which may be triggered by changes in pH. Any appropriate encapsulation method may be used. Exemplary encapsulation techniques include entrapment within a porous matrix, attachment or adsorption on solid carrier surfaces, self-aggregation by flocculation or with cross-linking agents, and mechanical containment behind a microporous membrane or a microcapsule. Guidance on encapsulation that may be useful for preparing compositions of the invention is widely available in the art (for example, in Mitropoulou, 2013; and Kailasapathy, 2002).

[0457] The composition may be administered orally and may be in the form of a tablet, capsule or powder. Encapsulated products are preferred because bacteria of the genus Alistipes are obligate anaerobes.

[0458] A composition of the invention includes a therapeutically effective amount of a bacterial strain of the invention. A therapeutically effective amount of a bacterial strain is sufficient to exert a beneficial effect upon a patient. A therapeutically effective amount of a bacterial strain may be sufficient to result in delivery to and/or partial or total colonisation of the patient's intestine.

[0459] A suitable daily dose of the bacteria, for example for an adult human, may be from about 1×10³ to about 1×10¹¹ colony forming units (CFU); for example, from about 1×10⁷ to about 1×10¹⁰ CFU; in another example from about 1×10⁶ to about 1×10¹⁰ CFU; in another example from about 1×10⁷ to about 1×10¹¹ CFU; in another example from about 1×10⁸ to about 1×10¹⁰ CFU; in another example from about 1×10⁸ to about 1×10¹¹ CFU.

[0460] In certain embodiments, the dose of the bacteria is at least 10⁹ cells per day, such as at least 10¹⁰, at least 10¹¹, or at least 10¹² cells per day.

[0461] In certain embodiments, a dose of the composition may comprise the bacterial strain in an amount of from about 1×10⁶ to about 1×10¹¹ colony forming units (CFU)/g, respect to the weight of the composition. The dose may be suitable for an adult human. For example, the composition may comprise the bacterial strain from about 1×10³ to about 1×10¹¹ CFU/g; for example, from about 1×10⁷ to about 1×10¹⁰ CFU/g; in another example from about 1×10⁶ to about 1×10¹⁰ CFU/g; in another example from about 1×10⁷ to about 1×10¹¹ CFU/g; in another example from about 1×10⁸ to about 1×10¹⁰ CFU/g; in another example from about 1×10⁸ to about 1×10¹¹ CFU/g, from about 1×10⁸ to about 1×10¹⁰ CFU/g. For example, from about 1×10⁸ to about 1×10¹⁰ CFU/g. The dose may be, for example, up to or over 1 g, 3 g, 5 g, and 10 g.

[0462] In some embodiments, the compositions described above and/or elsewhere herein comprise, consist, or consist essentially of an amount of bacterial strain from about 1×10³ to about 1×10¹¹ colony forming units per gram with respect to a weight of the composition.

[0463] In some embodiments, the compositions described above and/or elsewhere herein comprise the bacterial strain at a dose of between 500 mg and 1000 mg, between 600 mg and 900 mg, between 700 mg and 800 mg, between 500 mg and 750 mg or between 750 mg and 1000 mg. In certain embodiments, the invention provides the above pharmaceutical composition, wherein the lyophilised bacteria in the pharmaceutical composition is administered at a dose of between 500 mg and 1000 mg, between 600 mg and 900 mg, between 700 mg and 800 mg, between 500 mg and 750 mg, or between 750 mg and 1000 mg.

[0464] The composition may be formulated as a probiotic. A probiotic is defined by the FAO/WHO as a live microorganism that, when administered in adequate amounts, confers a health benefit on the host.

[0465] Typically, a probiotic, such as the composition of the invention, is optionally combined with at least one suitable prebiotic compound. A prebiotic compound is usually a non-digestible carbohydrate such as an oligosaccharide or polysaccharide, or a sugar alcohol, which is not degraded or absorbed in the upper digestive tract. Known prebiotics include commercial products such as inulin and transgalactoligosaccharides.

[0466] Other prebiotic compounds (such as vitamin C, for example), may be included as oxygen scavengers and to improve the delivery and/or partial or total colonisation and survival in vivo. Alternatively, the probiotic composition of the invention may be administered orally as a food or nutritional product, such as milk or whey based fermented dairy product, or as a pharmaceutical product.

[0467] In certain embodiments, the probiotic composition of the present invention includes a prebiotic compound in an amount of from about 1 to about 30% by weight, respect to the total weight composition (e.g., from 5 to 20% by weight). Known prebiotics include commercial products such as inulin and transgalactoligosaccharides.

[0468] In some embodiments, the prebiotic is a carbohydrate selected from the group comprising or consisting of fructooligosaccharides (or FOS), short-chain fructooligosaccharides, inulin, isomaltoligosaccharides, pectins, xylooligosaccharides (or XOS), chitosanoligosaccharides (or COS), beta-glucans, arable gum modified and resistant starches, polydextrose, tagatose, acacia fibers, carob, oats, and citrus fibers. In one aspect, the prebiotics are the short-chain fructooligosaccharides. Short-chain FOS are not digestible carbohydrates, generally obtained by the conversion of the beet sugar and including a saccharose molecule to which three glucose molecules are bonded.

[0469] The compositions of the invention may comprise pharmaceutically acceptable excipients or carriers, such as those described in Handbook of Pharmaceutical Excipients. Acceptable carriers or diluents for therapeutic use are well known in the pharmaceutical art and are described, for example, in Remington's Pharmaceutical Sciences. Examples of suitable carriers include lactose, starch, glucose, methyl cellulose, magnesium stearate, mannitol, sorbitol and the like. Examples of suitable diluents include ethanol, glycerol and water. The choice of pharmaceutical carrier, excipient or diluent can be selected with regard to the intended route of administration and standard pharmaceutical practice. The pharmaceutical compositions may comprise as, or in addition to, the carrier, excipient or diluent one or more suitable binders, lubricants, suspending agents, coating agents, and/or solubilising agents. Examples of suitable binders include starch, gelatin, natural sugars such as glucose, anhydrous lactose, free-flow lactose, β-lactose, corn sweeteners, natural and synthetic gums, such as acacia, tragacanth or sodium alginate, carboxymethyl cellulose and polyethylene glycol. Examples of suitable lubricants include sodium oleate, sodium stearate, magnesium stearate, sodium benzoate, sodium acetate, sodium chloride and the like. Preservatives, stabilizers, dyes and even flavouring agents may be provided in the pharmaceutical composition. Examples of preservatives include sodium benzoate, sorbic acid, cysteine and esters of 4-hydroxybenzoic acid, for example, in some embodiments the preservative is selected from sodium benzoate, sorbic acid and esters of 4-hydroxybenzoic acid. Antioxidants and suspending agents may be also used. A further example of a suitable carrier is saccharose. A further example of a suitable preservative is cysteine.

[0470] The compositions of the invention may be formulated as a food product. For example, a food product may provide nutritional benefit in addition to the therapeutic effect of the invention, such as in a nutritional supplement. Similarly, a food product may be formulated to enhance the taste of the composition of the invention or to make the composition more attractive to consume by being more similar to a common food item, rather than to a pharmaceutical composition. In certain embodiments, the composition of the invention is formulated as a milk-based product. The term “milk-based product” means any liquid or semi-solid milk-based or whey-based product having a varying fat content. The milk-based product can be, e.g., cow's milk, goat's milk, sheep's milk, skimmed milk, whole milk, milk recombined from powdered milk and whey without any processing, or a processed product, such as yoghurt, curdled milk, curd, sour milk, sour whole milk, butter milk and other sour milk products. Alternatively, the milk could be a plant-based milk, including for example, soy milk, oat milk, almond milk, coconut milk, or macadamia milk. Another important group includes milk beverages, such as whey beverages, fermented milks, condensed milks, infant or baby milks; flavoured milks, ice cream; milk-containing food such as sweets.

[0471] In some embodiments, the compositions disclosed herein comprise one or more bacterial strains of the genus Alistipes and do not contain bacteria from any other species, or which comprise only de minimis or biologically irrelevant amounts of bacteria from another species. Thus, in some embodiments, the invention provides a composition comprising one or more bacterial strains of the genus Alistipes (e.g., Alistipes shahii), which does not contain bacteria from any other species or which comprises only de minimis or biologically irrelevant amounts of bacteria from another species, for use in therapy.

[0472] In some embodiments, the compositions comprise one or more bacterial strains of the genus Alistipes and do not contain bacteria from any other genus or comprise only de minimis or biologically irrelevant amounts of bacteria from another. In some embodiments, the compositions comprise one or more bacterial strains of the genus Alistipes (e.g., Alistipes shahii) and do not contain bacteria from any other genus or comprise only de minimis or biologically irrelevant amounts of bacteria from another.

[0473] In certain embodiments, the compositions disclosed herein contain a single bacterial species and do not contain any other bacterial species. In certain embodiments, the compositions disclosed herein contain a single bacterial strain and do not contain any other bacterial strains. For example, the compositions of the invention may comprise bacteria only of a strain of A. shahii. Such compositions may comprise only de minimis or biologically irrelevant amounts of other bacterial strains or species. Such compositions may be a culture that is substantially free from other species of organism. In some embodiments, such compositions may be a in a dried form and be substantially free from other species of organism.

[0474] In some embodiments, the invention provides a composition comprising a single bacterial strain of the genus Alistipes which does not contain bacteria from any other strains or which comprises only de minimis or biologically irrelevant amounts of bacteria from another strain for use in therapy. In some embodiments, the invention provides a composition comprising a single bacterial strain of the species Alistipes shahii (e.g., Alistipes shahii MH21-1, Alistipes shahii MH21-2, or Alistipes shahii MH21-3) and which does not contain bacteria from any other strains or which comprises only de minimis or biologically irrelevant amounts of bacteria from another strain for use in therapy.

[0475] In some embodiments, the compositions disclosed herein comprise one or more bacterial strains of the genus Colonithrix and do not contain bacteria from any other species, or which comprise only de minimis or biologically irrelevant amounts of bacteria from another species. Thus, in some embodiments, the invention provides a composition comprising one or more bacterial strains of the genus Colonithrix (e.g., C. sana), which does not contain bacteria from any other species or which comprises only de minimis or biologically irrelevant amounts of bacteria from another species, for use in therapy.

[0476] In some embodiments, the compositions comprise one or more bacterial strains of the genus Colonithrix and do not contain bacteria from any other genus or comprise only de minimis or biologically irrelevant amounts of bacteria from another. In some embodiments, the compositions comprise one or more bacterial strains of the genus Colonithrix and do not contain bacteria from any other genus or comprise only de minimis or biologically irrelevant amounts of bacteria from another.

[0477] In certain embodiments, the compositions disclosed herein contain a single bacterial species and do not contain any other bacterial species. In certain embodiments, the compositions disclosed herein contain a single bacterial strain and do not contain any other bacterial strains. For example, the compositions of the invention may comprise bacteria only of a strain of C. sana. Such compositions may comprise only de minimis or biologically irrelevant amounts of other bacterial strains or species. Such compositions may be a culture that is substantially free from other species of organism. In some embodiments, such compositions may be a in a dried form and be substantially free from other species of organism.

[0478] In some embodiments, the invention provides a composition comprising a single bacterial strain of the genus Colonithrix which does not contain bacteria from any other strains or which comprises only de minimis or biologically irrelevant amounts of bacteria from another strain for use in therapy.

[0479] In some embodiments, the invention provides a composition comprising a single bacterial strain of the species Colonithrix sana (e.g., C. sana MH35-1, or C. sana MH35-2) and which does not contain bacteria from any other strains or which comprises only de minimis or biologically irrelevant amounts of bacteria from another strain for use in therapy.

[0480] In some embodiments, the compositions disclosed herein comprise one or more bacterial strains of the genus Gemmiger and do not contain bacteria from any other species, or which comprise only de minimis or biologically irrelevant amounts of bacteria from another species. Thus, in some embodiments, the invention provides a composition comprising one or more bacterial strains of the genus Gemmiger (e.g., Gemmiger formicilis), which does not contain bacteria from any other species or which comprises only de minimis or biologically irrelevant amounts of bacteria from another species, for use in therapy.

[0481] In some embodiments, the compositions comprise one or more bacterial strains of the genus Gemmiger and do not contain bacteria from any other genus or comprise only de minimis or biologically irrelevant amounts of bacteria from another. In some embodiments, the compositions comprise one or more bacterial strains of the genus Gemmiger (e.g., Gemmiger formicilis) and do not contain bacteria from any other genus or comprise only de minimis or biologically irrelevant amounts of bacteria from another.

[0482] In certain embodiments, the compositions disclosed herein contain a single bacterial species and do not contain any other bacterial species. In certain embodiments, the compositions disclosed herein contain a single bacterial strain and do not contain any other bacterial strains. For example, the compositions of the invention may comprise bacteria only of a strain of G. formicilis. Such compositions may comprise only de minimis or biologically irrelevant amounts of other bacterial strains or species. Such compositions may be a culture that is substantially free from other species of organism. In some embodiments, such compositions may be a in a dried form and be substantially free from other species of organism.

[0483] In some embodiments, the invention provides a composition comprising a single bacterial strain of the genus Gemmiger which does not contain bacteria from any other strains or which comprises only de minimis or biologically irrelevant amounts of bacteria from another strain for use in therapy. In some embodiments, the invention provides a composition comprising a single bacterial strain of the species Gemmiger (e.g., Gemmiger formicilis MH32-1) and which does not contain bacteria from any other strains or which comprises only de minimis or biologically irrelevant amounts of bacteria from another strain for use in therapy.

[0484] In certain embodiments, the compositions of the invention contain a single bacterial strain or species and do not contain any other bacterial strains or species. Such compositions may comprise only de minimis or biologically irrelevant amounts of other bacterial strains or species. Such compositions may be a culture that is substantially free from other species of organism.

[0485] In certain embodiments, the compositions of the invention consist of 1, 2, 3, 4, 5, 6, 7, 8, 9, 10, 11, 12, 13, 14, 15 or 16 bacterial strains or species. In certain embodiments, the compositions consist of from 1 to 10, preferably from 1 to 5 bacterial strains or species. In some embodiments, the compositions disclosed herein comprise more than one strain from within the same species (e.g., more than 1, 2, 3, 4, 5, 6, 7, 8, 9, 10, 15, 20, 25, 30, 35, 40 or 45 strains), and, optionally, do not contain bacteria from any other species. In some embodiments, the compositions disclosed herein comprise less than 50 strains from within the same species (e.g., less than 45, 40, 35, 30, 25, 20, 15, 12, 10, 9, 8, 7, 6, 5, 4 or 3 strains), and, optionally, do not contain bacteria from any other species. In some embodiments, the compositions disclosed herein comprise 1-40, 1-30, 1-20, 1-19, 1-18, 1-15, 1-10, 1-9, 1-8, 1-7, 1-6, 1-5, 1-4, 1-3, 1-2, 2-50, 2-40, 2-30, 2-20, 2-15, 2-10, 2-5, 6-30, 6-15, 16-25, or 31-50 strains from within the same species and, optionally, do not contain bacteria from any other species. In some embodiments, the compositions disclosed herein comprise more than one species from within the same genus (e.g., more than 1, 2, 3, 4, 5, 6, 7, 8, 9, 10, 12, 15, 17, 20, 23, 25, 30, 35 or 40 species), and, optionally, do not contain bacteria from any other genus. In some embodiments, the compositions disclosed herein comprise less than 50 species from within the same genus (e.g., less than 50, 45, 40, 35, 30, 25, 20, 15, 12, 10, 8, 7, 6, 5, 4 or 3 species), and, optionally, do not contain bacteria from any other genus. In some embodiments, the compositions disclosed herein comprise 1-50, 1-40, 1-30, 1-20, 1-15, 1-10, 1-9, 1-8, 1-7, 1-6, 1-5, 1-4, 1-3, 1-2, 2-50, 2-40, 2-30, 2-20, 2-15, 2-10, 2-5, 6-30, 6-15, 16-25, or 31-50 species from within the same genus and, optionally, do not contain bacteria from any other genus. The invention comprises any combination of the foregoing.

[0486] In some embodiments, the compositions of the invention comprise more than one bacterial strain or species. For example, in some embodiments, the compositions of the invention comprise more than one strain from within the same species (e.g., more than 1, 2, 3, 4, 5, 6, 7, 8, 9, 10, 15, 20, 25, 30, 35, 40 or 45 strains), and, optionally, do not contain bacteria from any other species. In some embodiments, the compositions of the invention comprise less than 50 strains from within the same species (e.g., less than 45, 40, 35, 30, 25, 20, 15, 12, 10, 9, 8, 7, 6, 5, 4 or 3 strains), and, optionally, do not contain bacteria from any other species. In some embodiments, the compositions of the invention comprise 1-40, 1-30, 1-20, 1-19, 1-18, 1-15, 1-10, 1-9, 1-8, 1-7, 1-6, 1-5, 1-4, 1-3, 1-2, 2-50, 2-40, 2-30, 2-20, 2-15, 2-10, 2-5, 6-30, 6-15, 16-25, or 31-50 strains from within the same species and, optionally, do not contain bacteria from any other species. In some embodiments, the compositions of the invention comprise more than one species from within the same genus (e.g., more than 1, 2, 3, 4, 5, 6, 7, 8, 9, 10, 12, 15, 17, 20, 23, 25, 30, 35 or 40 species), and, optionally, do not contain bacteria from any other genus. In some embodiments, the compositions of the invention comprise less than 50 species from within the same genus (e.g., less than 50, 45, 40, 35, 30, 25, 20, 15, 12, 10, 8, 7, 6, 5, 4 or 3 species), and, optionally, do not contain bacteria from any other genus. In some embodiments, the compositions of the invention comprise 1-50, 1-40, 1-30, 1-20, 1-15, 1-10, 1-9, 1-8, 1-7, 1-6, 1-5, 1-4, 1-3, 1-2, 2-50, 2-40, 2-30, 2-20, 2-15, 2-10, 2-5, 6-30, 6-15, 16-25, or 31-50 strains from within the same genus and, optionally, do not contain bacteria from any other genus. The invention comprises any combination of the foregoing.

[0487] In certain embodiments, the pharmaceutical composition of the invention comprises between 1-50 distinct bacterial strains, such as between 1-50, 1-40, 1-30, 1-20, 1-19, 1-18, 1-17, 1-16, 1-15, 1-14, 1-13, 1-12, 1-11, 1-10, 1-9, 1-8, 1-7, 1-6, 1-5, 1-4, 1-3 or 2 distinct bacterial strains. In certain embodiments, the pharmaceutical composition of the invention comprises between 1-50 distinct bacterial strains, such as between 1-50, 1-40, 1-30, 1-20, 1-19, 1-18, 1-17, 1-16, 1-15, 1-14, 1-13, 1-12, 1-11, 1-10, 1-9, 1-8, 1-7, 1-6, 1-5, 1-4, 1-3 or 2 distinct bacterial strains.

[0488] In some embodiments, the composition of the invention additionally comprises a bacterial strain that has the same safety and therapeutic efficacy characteristics as a strain deposited at the NMI (Australia) under accession no. V21/014432, V21/014433, and/or V21/014434.

[0489] In some embodiments, the composition of the invention additionally comprises a bacterial strain that has the same safety and therapeutic efficacy characteristics as a strain deposited at the NMI (Australia) under accession no. V21/019213 and/or V21/019214.

[0490] In some other embodiments, the composition of the invention additionally comprises a bacterial strain that has the same safety and therapeutic efficacy characteristics as a strain deposited at the NMI (Australia) under accession no. V21/011520.

[0491] In some embodiments in which the composition of the invention comprises more than one bacterial strain, species or genus, the individual bacterial strains, species or genera may be for separate, simultaneous or sequential administration. For example, the composition may comprise all of the more than one bacterial strain, species or genera, or the bacterial strains, species or genera may be stored separately and be administered separately, simultaneously or sequentially. In some embodiments, the more than one bacterial strains, species or genera are stored separately but are mixed together prior to use.

[0492] Preferably, the compositions disclosed herein are to be administered to the gastrointestinal (GI) tract in order to enable delivery to, and/or partial or total colonisation of, the intestine with the bacterial strain of the invention. In other words, the bacteria may colonise some or all of the GI tract and such colonisation may be transient or permanent. More specifically, the phrase “total colonisation of the intestine” means that bacteria have colonised all parts of the intestine (i.e., the small intestine, large intestine and rectum). Additionally or alternatively, the term “total colonisation” means that the bacteria engraft permanently in some or all parts of the intestine.

[0493] Similarly, the phrase “partial colonisation of the intestine” means that bacteria have colonised some but not all parts of the intestine. Additionally or alternatively, the term “partial colonisation” means that the bacteria engraft transiently in some or all parts of the intestine.

[0494] The transience of engraftment of bacteria can be determined by assessing (e.g., in a fecal sample) the abundance of the bacterial strain of the invention periodically (e.g., daily or weekly) following the end of a dosing interval to determine the washout period, i.e., the period between conclusion of the dosing interval and there being no detectable levels of the bacterial strain of the invention present. In some embodiments, the washout period is 14 days or less, 12 days or less, 10 days or less, 7 days or less, 4 days or less, 3 days or less, 2 days or less, or 1 day or less.

[0495] In some embodiments, the bacteria described above or elsewhere herein engraft transiently in the large intestine.

[0496] In some embodiments, the bacterial strains of the invention are obtained from human adult faeces. In some embodiments in which the composition of the invention comprises more than one bacterial strain, all of the bacterial strains are obtained from human adult faeces or if other bacterial strains are present they are present only in de minimis amounts. The bacteria may have been cultured subsequent to being obtained from these human adult faeces and being used in a composition of the invention.

[0497] In some embodiments, the one or more Alistipes bacterial strain is/are the only therapeutically active agents in a composition of the invention. In some embodiments, the bacterial strains in the composition is/are the only therapeutically active agents in a composition of the invention.

[0498] The compositions for use in accordance with the invention may or may not require marketing approval.

[0499] In certain embodiments, the invention provides the above pharmaceutical composition, wherein said bacterial strain is in a dried form. In some cases, the bacterial strain is reconstituted prior to administration. In some cases, the reconstitution is by use of a diluent described herein. In certain embodiments, the invention provides the above pharmaceutical composition, wherein said bacterial strain is spray dried. In certain embodiments, the invention provides the above pharmaceutical composition, wherein the bacterial strain is lyophilised or spray dried and wherein it is live. In certain embodiments, the invention provides the above pharmaceutical composition, wherein the bacterial strain is lyophilised or spray dried and wherein it is viable. In certain embodiments, the invention provides the above pharmaceutical composition, wherein the bacterial strain is lyophilised or spray dried and wherein it is capable of partially or totally colonising the intestine. In certain embodiments, the invention provides the above pharmaceutical composition, wherein the bacterial strain is dried (e.g., lyophilised or spray dried) and wherein it is viable and capable of partially or totally colonising the intestine. In some of the same embodiments and some alternative embodiments, the bacterial strain transiently colonises the intestine.

[0500] In some cases, the lyophilised or spray dried bacterial strain is reconstituted prior to administration. In some cases, the reconstitution is by use of a diluent described herein.

[0501] The compositions of the invention can comprise pharmaceutically acceptable excipients, diluents or carriers.

[0502] In certain embodiments, the invention provides a pharmaceutical composition comprising: a bacterial strain of the invention; and a pharmaceutically acceptable excipient, carrier or diluent; wherein the bacterial strain is in an amount sufficient to treat or prevent an inflammatory or autoimmune disorder when administered to a subject in need thereof. In some preferred embodiments, the inflammatory or autoimmune disorder is selected from the group comprising: an inflammatory bowel disease (such as Crohn's disease or ulcerative colitis); asthma (such as allergic asthma or neutrophilic asthma); arthritis (such as rheumatoid arthritis, osteoarthritis, psoriatic arthritis, or juvenile idiopathic arthritis); fatty liver disease (such as nonalcoholic fatty liver disease (NAFLD)); ankylosing spondylitis; psoriasis; systemic lupus erythematosus (SLE); scleroderma; Sjogren's syndrome; vasculitis; and type 1 diabetes mellitus.

[0503] In certain embodiments, the invention provides pharmaceutical composition comprising: a bacterial strain of the invention; and a pharmaceutically acceptable excipient, carrier or diluent; wherein the bacterial strain is in an amount sufficient to treat or prevent an inflammatory or autoimmune disorder mediated by the STAT3 signalling pathway. In preferred embodiments, said disorder is selected from the group consisting of an inflammatory bowel disease (such as Crohn's disease or ulcerative colitis); asthma (such as allergic asthma or neutrophilic asthma); arthritis (such as rheumatoid arthritis, osteoarthritis, psoriatic arthritis, or juvenile idiopathic arthritis); fatty liver disease (such as nonalcoholic fatty liver disease (NAFLD)); ankylosing spondylitis; psoriasis; systemic lupus erythematosus (SLE); scleroderma; Sjogren's syndrome; vasculitis; and type 1 diabetes mellitus.

[0504] In certain embodiments, the invention provides the above pharmaceutical composition, wherein the amount of the bacterial strain is from about 1×10³ to about 1×10¹¹ colony forming units (CFU) per gram with respect to a weight of the composition.

[0505] In certain embodiments, the invention provides the above pharmaceutical composition, wherein the composition is administered at a dose of up to or over 1 g, 3 g, 5 g or 10 g.

[0506] In certain embodiments, the invention provides the above pharmaceutical composition, wherein the composition is administered by a method selected from the group consisting of oral, rectal, subcutaneous, nasal, buccal, and sublingual.

[0507] In certain embodiments, the invention provides the above pharmaceutical composition, comprising a carrier selected from the group consisting of lactose, starch, glucose, methyl cellulose, magnesium stearate, mannitol and sorbitol.

[0508] In certain embodiments, the invention provides the above pharmaceutical composition, comprising a diluent selected from the group consisting of ethanol, glycerol and water.

[0509] In certain embodiments, the invention provides the above pharmaceutical composition, comprising an excipient selected from the group consisting of starch, gelatin, glucose, anhydrous lactose, free-flow lactose, beta-lactose, corn sweetener, acacia, tragacanth, sodium alginate, carboxymethyl cellulose, polyethylene glycol, sodium oleate, sodium stearate, magnesium stearate, sodium benzoate, sodium acetate and sodium chloride.

[0510] In certain embodiments, the invention provides the above pharmaceutical composition, further comprising at least one of a preservative, an antioxidant and a stabilizer.

[0511] In certain embodiments, the invention provides the above pharmaceutical composition, comprising a preservative selected from the group consisting of sodium benzoate, sorbic acid and esters of 4-hydroxybenzoic acid.

[0512] In certain embodiments, the invention provides the above pharmaceutical composition, wherein said bacterial strain is in a dried form (e.g., lyophilised, spray dried, fluidized bed dried, etc.).

[0513] In certain embodiments, the invention provides the above pharmaceutical composition, wherein when the composition is stored in a sealed container at about 4° C. or about 25° C. and the container is placed in an atmosphere having 50% relative humidity, at least 80% of the bacterial strain as measured in colony forming units, remains after a period of at least about: 1 month, 3 months, 6 months, 1 year, 1.5 years, 2 years, 2.5 years or 3 years.

[0514] In some embodiments, the composition of the invention is provided in a sealed container comprising a composition as described herein. In some embodiments, the sealed container is a sachet or bottle. In some embodiments, the composition of the invention is provided in a syringe comprising a composition as described herein.

[0515] The composition of the present invention may, in some embodiments, be provided as a pharmaceutical formulation. For example, the composition may be provided as a tablet or capsule. In some embodiments, the capsule is a gelatine capsule (“gel-cap”). The capsule can be a hard or a soft capsule. In some embodiments, the formulation is a soft capsule. Soft capsules are capsules which may, owing to additions of softeners, such as, for example, glycerol, sorbitol, maltitol and polyethylene glycols, present in the capsule shell, have a certain elasticity and softness. Soft capsules can be produced, for example, on the basis of gelatine or starch. Gelatine-based soft capsules are commercially available from various suppliers. Depending on the method of administration, such as, for example, orally or rectally, soft capsules can have various shapes, they can be, for example, round, oval, oblong or torpedo-shaped. Soft capsules can be produced by conventional processes, such as, for example, by the Scherer process, the Accogel process or the droplet or blowing process.

[0516] In some embodiments, the compositions disclosed herein are administered orally. Oral administration may involve swallowing, so that the compound enters the GI tract.

[0517] Pharmaceutical formulations suitable for oral administration include solid plugs, solid microparticulates, semi-solid and liquid (including multiple phases or dispersed systems) such as tablets; soft or hard capsules containing multi- or nano-particulates, liquids (e.g., aqueous solutions), emulsions or powders; lozenges (including liquid-filled); chews; gels; fast dispersing dosage forms; films; ovules; sprays; and buccal/mucoadhesive patches.

[0518] In some embodiments the pharmaceutical formulation is an enteric formulation, i.e., a gastro-resistant formulation (for example, resistant to gastric pH) that is suitable for delivery of the composition of the invention to the intestine by oral administration. Enteric formulations may be particularly useful when the bacteria or another component of the composition is acid-sensitive (e.g., prone to degradation under gastric conditions).

[0519] In some embodiments, the enteric formulation comprises an enteric coating. In some embodiments, the formulation is an enteric-coated dosage form. For example, the formulation may be an enteric-coated tablet or an enteric-coated capsule, or the like. The enteric coating may be a conventional enteric coating, for example, a conventional coating for a tablet, capsule, or the like for oral delivery. The formulation may comprise a film coating, for example, a thin film layer of an enteric polymer (e.g., an acid-insoluble polymer).

[0520] In some embodiments, the enteric formulation is intrinsically enteric, for example, gastro-resistant without the need for an enteric coating. Thus, in some embodiments, the formulation is an enteric formulation that does not comprise an enteric coating. In some embodiments, the formulation is a capsule made from a thermogelling material. In some embodiments, the thermogelling material is a cellulosic material, such as methylcellulose, hydroxymethylcellulose or hydroxypropylmethylcellulose (HPMC). In some embodiments, the capsule comprises a shell that does not contain any film forming polymer. In some embodiments, the capsule comprises a shell and the shell comprises hydroxypropylmethylcellulose and does not comprise any film-forming polymer (as described in United States Patent Publication No. 2016/0067188). In some embodiments, the formulation is an intrinsically enteric capsule (for example, VCAPS® from Capsugel).

[0521] In some embodiments, the composition is a probiotic or a medical food comprising a bacterial strain of A. shahii. The bacteria can be administered, for instance, as a probiotic, as a capsule, tablet, caplet, pill, troche, lozenge, power, and/or granule. This strain can also be formulated as a nutraceutical, conventional food, medical food, or drug. The bacteria can also be administered as part of a fecal transplant or via suppository. In some embodiments, the composition is formulated for delivery to the gut, as described further herein, in some embodiments had the composition further comprise a prebiotic.

Co-Administering with Additional Agents

[0522] In some embodiments, the methods described herein can further comprise co-administering a second agent and/or treatment to the subject (e.g., as part of a therapy). The combination therapy, where employed, can be tailored to the particular indication. For example, where a strain of the species A. shahii is administered to treat an inflammatory disorder (e.g., an inflammatory bowel disease), it can be administered in combination with an anti-inflammatory agent or therapy as known in the art of approved for clinical treatment of an inflammatory disorder. Other indications can be similarly treated with, for example, strains of the species A. shahii as described herein in combination with agents known in the art or approved for the clinical treatment of those indications.

[0523] Similarly, where a strain of the species C. sana is administered to treat an inflammatory disorder (e.g., an inflammatory bowel disease), it can be administered in combination with an anti-inflammatory agent or therapy as known in the art of approved for clinical treatment of an inflammatory disorder. Other indications can be similarly treated with, for example, strains of the species C. sana as described herein in combination with agents known in the art or approved for the clinical treatment of those indications.

[0524] Similarly, where a strain of the species G. formicilis is administered to treat an inflammatory disorder (e.g., an inflammatory bowel disease), it can be administered in combination with an anti-inflammatory agent or therapy as known in the art of approved for clinical treatment of an inflammatory disorder. Other indications can be similarly treated with, for example, strains of the species G. formicilis as described herein in combination with agents known in the art or approved for the clinical treatment of those indications.

[0525] Suitable anti-inflammatory agents that could be used in the treatment of an inflammatory bowel disease include, but not necessarily limited are, the group comprising 5-aminosaliculates, corticosteroids, azathioprine, infliximab, and adalimumab.

[0526] The present invention also includes the compositions as described above, further comprising an anti-inflammatory agent. Such compositions can optionally be in the form of a single composition, or alternatively, two of more separate compositions.

### 11. Screening Methods

[0527] The invention also includes methods of identifying bacterial strains that are suitable for use in the methods of the present invention. Such methods typically include screening for a bacterial strain with a particular functional activity. Suitable assays include those described in the below examples, but any assay for measuring gut barrier function, mucosal healing, modulation of NF-κB activation, or modulation of STAT3 signalling are equally as applicable.

[0528] In some embodiments, the screening method identifies the ability of a bacterial strain of Alistipes to modulate STAT3 signalling pathway. By way of an illustrative example, the invention provides a method of blocking or otherwise inhibiting the activation of STAT3 signalling in a target cell, the method comprising contacting the target cell with at least a soluble component of a bacterial cell preparation of the species Alistipes shahii, to block or otherwise inhibit the activation of STAT3 signalling in the target cell.

[0529] In some embodiments, the screening method identifies the ability of a bacterial strain of Colonithrix to modulate STAT3 signalling pathway. By way of an illustrative example, the invention provides a method of blocking or otherwise inhibiting the activation of STAT3 signalling in a target cell, the method comprising contacting the target cell with at least a soluble component of a bacterial cell preparation of the specie C. sana, to block or otherwise inhibit the activation of STAT3 signalling in the target cell.

[0530] In some embodiments, the screening method identifies the ability of a bacterial strain of Gemmiger to modulate STAT3 signalling pathway. By way of an illustrative example, the invention provides a method of blocking or otherwise inhibiting the activation of STAT3 signalling in a target cell, the method comprising contacting the target cell with at least a soluble component of a bacterial cell preparation of the species G. formicilis, to block or otherwise inhibit the activation of STAT3 signalling in the target cell.

[0531] In some embodiments of this type, the target cell is selected from the group comprising screening a bacterial strain for a functional reporter cell (e.g., a HEK cell), an immune cell (e.g., a Th17 immune cell), an epithelial cell, and an endothelial cell.

[0532] In some embodiments, the bacterial cell preparation comprises a bacterial cell culture. Suitably, the soluble component may comprise the supernatant of the bacterial cell culture. In some embodiments of this type, the soluble component is substantially depleted of bacterial cells.

[0533] In some alternative embodiments, the bacterial cell preparation comprises a bacterial cell pellet. Preferably, the bacterial cells of the cell pellet are lysed by any means known in the art. After cell lysis, it is typical for the cell lysate soluble fraction to be separated from the insoluble fraction. The cell lysate may be subject to further processing before being during the screening assay. (e.g., diluted in a buffer), or exposed to a processing reagent.

### 12. Modes of Administration

[0534] Preferably, the compositions of the invention are to be administered to the GI tract in order to enable delivery to the intestine with the bacterial strain of the invention. Preferably, the compositions of the invention are formulated to be administered to the GI tract in order to enable delivery to the intestine with the bacterial strain of the invention. In some embodiments the compositions of the invention are formulated to be administered to the GI tract in order to enable delivery to, and partial or total colonization of, the intestine with the bacterial strain of the invention.

[0535] In certain embodiments, the compositions of the invention may be administered as a foam, as a spray or a gel.

[0536] In certain embodiments, the compositions of the invention may be administered as a suppository, such as a rectal suppository, for example in the form of a Theobroma oil (cocoa butter), synthetic hard fat (e.g., Suppocire®, WITEPSOL), glycerogelatin, polyethylene glycol, or soap glycerin composition.

[0537] In certain embodiments, the compositions of the invention are administered to the GI tract via a tube, such as a nasogastric tube, orogastric tube, gastric tube, jejunostomy tube (J-tube), percutaneous endoscopic gastrostomy (PEG), or a port, such as a chest wall port that provides access to the stomach, jejunum and other suitable access ports.

[0538] The compositions of the invention may be administered once, or they may be administered sequentially as part of a treatment regimen. In certain embodiments, the compositions of the invention are to be administered daily (either once or several times). In certain embodiments, the compositions disclosed herein are administered regularly, such as daily, every two days, or weekly, for an extended period of time, such as for at least one week, two weeks, one month, two months, six months, or one year.

[0539] In some embodiments, the compositions disclosed herein are administered for 7 days, 14 days, 16 days, 21 days or 28 days or no more than 7 days, 14 days, 16 days, 21 days, or 28 days. For example, in some embodiments the compositions disclosed herein are administered for 16 days.

[0540] In certain embodiments of the invention, treatment according to the invention is accompanied by assessment of the patient's gut microbiota. Treatment may be repeated if delivery of and/or partial or total colonisation with the strain of the invention is not achieved such that efficacy is not observed, or treatment may be ceased if delivery and/or partial or total colonisation is successful, and efficacy is observed.

[0541] In certain embodiments, the composition of the invention may be administered to a pregnant animal, for example a mammal such as a human in order to prevent an inflammatory or autoimmune disorder (such as those disclosed herein) developing in her child in utero and/or after it is born.

[0542] The compositions of the invention may be administered to a patient that has been diagnosed with: a disease or condition mediated by gut barrier function dysregulation; or that has been identified as being at risk of a disease or condition mediated by gut barrier dysfunction; a disease or condition mediated by the STAT3 signalling pathway, or that has been identified as being at risk of a disease or condition mediated by the STAT3 signalling pathway; or an inflammatory or autoimmune disorder (such as those disclosed herein). The compositions may also be administered as a prophylactic measure to prevent the development of diseases or conditions mediated by the STAT3 signalling pathway in a healthy patient.

[0543] The compositions disclosed herein may be administered to a patient that has been diagnosed with an inflammatory or autoimmune disorder, in particular an inflammatory or autoimmune disorder mediated by the microbiota-gut axis, or that has been identified as being at risk of an inflammatory or autoimmune disorder, in particular an inflammatory or autoimmune disorder mediated by the microbiota-gut axis. The compositions may also be administered as a prophylactic measure to prevent the development of inflammatory or autoimmune disorders, in particular inflammatory or autoimmune disorders mediated by the microbiota-gut axis in a healthy patient.

[0544] The compositions of the invention may be administered to a patient that has been identified as having an abnormal gut microbiota. For example, the patient may have reduced or absent colonisation by bacteria of the genus Alistipes, in particular A. shahii. Alternatively, or in addition, the patient may have reduced or absent colonisation by bacteria of the genus Colonithrix, in particular C. sana. Alternatively or in addition, the patient may have reduced or absent colonisation by bacteria of the genus Gemmiger, in particular G. formicilis.

[0545] The compositions of the invention may be administered as a food product, such as a nutritional supplement.

[0546] Generally, the compositions of the invention are for the prevention or treatment of human diseases, although they may be used to treat animals including monogastric mammals such as poultry, pigs, cats, dogs, horses or rabbits. The compositions of the invention may be useful for enhancing the growth and performance of animals. If administered to animals, oral gavage may be used.

[0547] In some embodiments, the subject to whom the composition is to be administered is an adult human. In some embodiments, the subject to whom the composition is to be administered is an infant human.

### 13. Culturing Methods

[0548] The bacterial strains for use in the present invention can be cultured using standard microbiology techniques as detailed in, for example, reference as taught in McSweeney, 2005.

[0549] The solid or liquid medium used for culture may, for example, be selected from TY or PYG medium.

[0550] Illustrative media formulations that are suitable for use with the present invention include those provided in Table 1.

TABLE 1
Culture Media Formulations

| | As_v1 | | TY | | PYG | | PYGM | | YG/V | |
|---|---|---|---|---|---|---|---|---|---|---|
| Tryptone | 15 | g | 10 | g | 20 | g | 20 | g | | |
| Soy Peptone | 5 | g | | | | | | | | |
| Vegetable | | | | | | | | | 20 | g |
| tryptone | | | | | | | | | | |
| Yeast extract | 5 | g | 2.5 | g | 10 | g | 10 | g | 10 | g |
| Glucose | 2.5 | g | 4 | g | 10 | g | 10 | g | 10 | g |
| Raffinose | 2.5 | g | | | | | | | | |
| Cellobiose | | | 1 | g | — | | | | | |
| Maltose | | | 1 | g | — | | | | | |
| Sodium | 5 | g | | | | | | | | |
| chloride | | | | | | | | | | |
| Hemin solution | 10 | mL | 1 | mL | 1 | mL | | | | |
| Menadione (10 | 0.1 | mL | | | | | 1 | mL | | |
| mg/ml) | | | | | | | | | | |
| Salts 2* | 38 | mL | 38 | mL | 38 | mL | 38 | mL | 38 | mL |
| Salts 3* | 38 | mL | 38 | mL | 38 | mL | 38 | mL | 38 | mL |
| Sodium | 8 | g | 8 | g | 8 | g | 8 | g | 8 | g |
| bicarbonate | | | | | | | | | | |
| Resazurin | 1 | mL | 1 | mL | 1 | mL | 1 | mL | 1 | mL |
| Acetic acid | | | 1.9 | mL | | | | | | |
| Cysteine | 1 | g | 1 | g | 1 | g | 1 | g | 1 | g |

| | | | | | |
|---|---|---|---|---|---|
| Water | to 1000 mL | to 1000 | to 1000 | to 1000 mL | to 1000 |
| | | mL | mL | | mL |

*Salts 2: K₂HPO₄ 6 g/L
*Salts 3: KH₂PO₄ 6 g/L, (NH₄)₂SO₄ 6 g/L, NaCl 12 g/L, MgSO₄•7H₂O 2.5 g/L, CaCl₂•2H₂O 1.6 g/L

[0551] In order that the invention may be readily understood and put into practical effect, particular preferred embodiments will now be described by way of the following non-limiting experimental examples.

### EXAMPLES

### Example 1

Alistipes Association with Health, IBD and Other Diseases.

[0552] Inflammatory bowel disease is characterised by structure-function changes to the microbiome with a significant reduction in both the prevalence and abundance of select gut bacteria in the IBD gut when compared to the healthy gut. Several studies have shown that these bacteria may modulate IBD pathogenesis (Mallone et al., 2011; and Sokol et al., 2008) however a key obstacle to using these bacteria to develop new therapeutics has been that low resolution 16S rRNA based profiling do not provide sufficient resolution to accurately discriminate against health and IBD associated strains at a low taxonomic level (i.e., genus, species, strain).

[0553] The inventors used the Microba Disease Database (MDD), which contains high resolution faecal gut metagenomic data and associated host metadata for 6,020 adults, to study the prevalence of species in the Alistipes “Clade A” (as shown in FIG. 1) in inflammatory and autoimmune diseases. Metagenomic sequence reads were analysed using the Microba Community Profiler (MCP) (Parks et al., 2021).

[0554] At least five Alistipes Clade A species were detected in more than 10% of MDD samples: A. shahii, A. finegoldii, A. senegalensis, A. onderdonkii and the uncultured species A. sp000434235.

[0555] The inventors found that four detected Alistipes Clade A species are prevalent in healthy humans but rarely detected in inflammatory and autoimmune diseases (FIG. 2A-E). The strongest effect was observed for IBD, including both major subtypes ulcerative colitis and Crohn's disease (FIG. 2, and Table 2, below). All five Alistipes species (A. shahii, A. finegoldii, A. onderdonkii, A. senagalensis, and A. sp000434235) were significantly less prevalent in IBD as compared to healthy (FIG. 2A, Table 2). The strongest reduction in IBD was observed for A. shahii (FIG. 2A, Table 2). These observations were validated in an independent IBD cohort previously published by Franzosa et al., (2018) (FIG. 2B, Table 2).

[0556] A. shahii, A. finegoldii and A. senegalensis were significantly less prevalent in a range of inflammatory and autoimmune conditions compared to healthy controls (FIG. 2C-E and Table 3).

TABLE 2
ASSOCIATION STATISTICS BETWEEN ALISTIPES SPECIES AND IBD

| | Prevalence (%) | | | | | | P Cochran- |
|---|---|---|---|---|---|---|---|
| | Control | CD | UC | Control | CD | UC | Mantel- |
| Taxon | MDD | MDD | MDD | Harvard | Harvard | Harvard | Haenszel test |
| A. shahii | 79.8 | 48.8 | 51.2 | 63.0 | 14.9 | 26.2 | 1.90 × 10⁻¹⁵ |
| A. finegoldii | 66.9 | 34.9 | 46.3 | 45.7 | 17.9 | 23.0 | 8.00 × 10⁻⁰⁹ |
| A. | 37.8 | 14.0 | 17.1 | 13.0 | 3.0 | 8.2 | 2.40 × 10⁻⁰⁶ |
| senegalensis | | | | | | | |
| A. onderdonkii | 73.4 | 62.8 | 56.1 | 52.2 | 20.9 | 45.9 | 0.00017 |
| A. | 14.6 | 11.6 | 4.9 | 4.3 | 0.0 | 3.3 | 0.019 |
| sp000434235 | | | | | | | |

TABLE 3
ASSOCIATION BETWEEN ALISTIPES
SPECIES AND INFLAMMATORY DISEASES

| | P Fisher's Exact Test | | | | |
|---|---|---|---|---|---|
| | Alistipes | Alistipes | Alistipes | Alistipes | Alistipes |
| Condition | shahii | finegoldii | senegalensis | onderdonkii | sp000434245 |
| Asthma | 0.0016 | 0.007 | 2.0 × 10⁻⁵ | — | — |
| Other autoimmune | 0.027 | 0.039 | 0.012 | — | — |
| conditions affecting | | | | | |
| the joints | | | | | |
| Psoriatic arthritis | — | 0.048 | — | — | — |
| Rheumatoid arthritis | 0.026 | — | 0.00085 | — | — |
| Fatty liver | 0.026 | — | 0.0033 | — | — |
| IBD | 2.3 × 10⁻⁹ | 1.9 × 10⁻⁶ | 3.03 × 10⁻⁶ | 0.0021 | 0.026 |
| Crohn's disease | 3.0 × 10⁻⁵ | 7.6 × 10⁻⁵ | 0.002 | — | — |
| Ulcerative colitis | 4.3 × 10⁻⁷ | 0.00088 | 0.00027 | 0.0031 | 0.016 |
| Non-alcohol fatty liver | 3.5 × 10⁻⁵ | — | 0.014 | — | — |
| disease | | | | | |
| Systemic | 6.6 × 10⁻⁵ | 0.0049 | 0.011 | — | — |
| autoimmune disease | | | | | |
| Type 1 diabetes | — | 0.011 | — | — | — |
| mellitus | | | | | |

Isolation and Genome-Scale Analysis of A. shahii

[0557] To better understand the role of A. shahii in health and the pathogenesis of IBD A. shahii MH21-1, MH21-2 and MH21-3 strains were isolated from healthy human donors. A. shahii grew well on As_v1 and PYG media and was typically observed as a Gram-negative staining short rod (FIG. 3A).

[0558] Phylogenetic reconstruction of the Alistipes genus using high-quality GenBank and RefSeq genomes from the NCBI and A. shahii MH21-1, MH21-2, and MH21-3 revealed the isolates placed with high confidence within the Alistipes shahii clade, close to several uncultured species (FIG. 3B). A. shahii MH21-1, MH21-2, and MH21-3 are sugar fermenters, and are predicted to utilize starch, glucose, gluconate, lactose, melibiose, and galactose as a carbon source. Complete, or near complete biosynthetic pathways were identified for most amino acids except tryptophan, aspartate, cysteine, and tyrosine. Several pathways for the uptake and fermentation of amino acids (Ala, Try, Asp, Cys, Glu, Gln, His, and Met) were also identified, but are likely not primary sources of energy. Metabolic modelling of the A. shahii isolate revealed that when fed with glucose and other hexose sugars, primary by-products of fermentation are acetate and propionate. Acetate is predicted to be the major by-product of fermentation by A. shahii MH21-1, MH21-2, and MH21-3 isolates. The biosynthetic potential of MH21-1 was assessed by searching for well characterised, and putative biosynthetic gene clusters (BGCs) using AntiSmash v5.0 and deepBGC, respectively. AntiSmash did not identify any BGCs, but DeepBGC identified the 3 unclassified BGC with >1 coding region and >0.75 deepBGC score, with two predicted to produce antibacterial products.

### A. Shahii Enhances Gut Barrier Function.

[0559] To assess the role of A. shahii in the healthy gut, naïve C57Bl/6 SPF mice were treated for 8 days with A. shahii MH21-1 (FIG. 4A). During this treatment period, there was no morbidity, and no changes in general appearance, behaviour, posture, mobility and neurological behaviour as compared to vehicle control, were observed. Similarly, there was no significant change in body weight in A. shahii MH21-1 treated animals relative to the vehicle control and colon length and weight/length ratio were also unaffected (FIGS. 4B-D). A. shahii MH21-1 did not result in any significant histological changes in the colon when compared to the vehicle as determined by assessing epithelial injury, inflammation and hypervascularization alone, or as a combined histopathological score (FIG. 4E-H).

[0560] It was hypothesised that the big-data approach described above could be used to identify novel candidate live biotherapeutics for inflammatory and autoimmune diseases (e.g., IBD). The inventors therefore tested the therapeutic efficacy of A. shahii MH21-1 in an acute model of DSS induced murine colitis (FIG. 5A) as this is a well-documented model of epithelial injury and repair. DSS treatment resulted in significant disease activity relative to the vehicle control. There was a significant reduction in body weight (FIG. 5B) which has been shown to be an accurate and reliable indicator of colitis (Britto et al., 2019). As expected, prednisone exacerbated the DSS induced weight loss (Yamamoto et al., 2013), however DSS induced weight loss was ameliorated by treatment with A. shahii MH21-1 or F. prausnitzii A2-165 (FIG. 5B).

[0561] Histological analysis of DSS treated mice revealed significant gut damage characterised by crypt loss, epithelial erosion and ulceration. Notably, treatment with A. shahii MH21-1 resulted in a significant improvement in pathology characterised by crypt re-formation and re-epithelisation (FIG. 5C) as evidenced by improvements in histopathological healing (FIG. 5D) and epithelial injury (FIG. 5E). Treatment with A. shahii MH21-1 also resulted in a significant increase in goblet cells and intraepithelial lymphocytes relative to the vehicle treated control (FIG. 5F-G). As expected, prednisone also resulted in a significant improvement in disease pathology.

[0562] The IL-23-Th17 cell immune axis is central to the pathogenesis of IBD and is a validated therapeutic target (Martin, et al., 2017). As the DSS model of gut barrier function is largely underpinned by Th1 polarised immunity (Marks et al., 2015) the therapeutic efficacy of A. shahii MH21-1 in the murine SKG model was also tested (FIG. 5H). SKG mice carry a mutation in the ZAP-70 gene and develop IL-23 driven Crohn's like ileitis following disease initiation with curdlan treatment (FIG. 41, (Liu et al., 2019)). Histological analysis of vehicle treated mice revealed significant gut damage characterised by infiltration of inflammatory cells and granuloma formation 7 days after curdlan treatment. As expected, treatment with the anti-IL-23 monoclonal antibody resulted in a significant reduction in histological damage. Treatment with A. shahii MH21-1 also resulted in significant improvement in pathology as evidenced by improvements in the histopathological score (FIG. 5I). Similarly, treatment with A. shahii MH21-1 also resulted in significant reduction in the production of cytokines central to disease pathogenesis including IL-23, IL-12 (IL-12p70), IL-6 and GM-CSF (FIG. 5J-M).

[0563] Taken together, these data revealed that A. shahii MH21-1 did not cause any adverse effects in naïve, DSS treated or SKG mice, and that A. shahii MH21-1 enhanced gut barrier function and promoted mucosal healing in DSS treated and SKG mice.

A. shahii Suppresses STAT3 Activation In Vitro.

[0564] Given the dramatic effects on histological inflammation and re-epithelialisation observed in the DSS treated animals, we next examined the ability of A. shahii to modulate IBD associated immune pathways. IL-23 driven immune responses are central to the pathogenesis of IBD and are a clinically recognised target (Friedrich et al., 2019; Yang et al., 2017). Therefore, the ability of A. shahii MH21-1 to suppress IL-23-mediated activation of STAT3 was examined, using the HEK-BLUE™ IL-23 reporter cell line. The HEK-BLUE™ IL-23 reporter cell line carries a STAT3 inducible SEAP reporter that is responsive to IL-23 stimulation. As expected, IL-23 mediated activation of STAT3 could be prevented by tofacitinib (FIG. 5A). Strikingly, cell free culture supernatant and the <3 kDa filtered fraction prepared from A. shahii MH21-1, A. shahii MH21-3 and A. shahii MH21-6 (grown in As_v1, PYG and TY medium respectively) suppressed SEAP reporter activity (FIG. 6A-C). No cytotoxic effects were observed following treatment with the A. shahii culture supernatants. Furthermore, the biochemical characteristics of the CS by size fractionation and heat treatment were analysed. Through this approach, we determined that the STAT3 suppressive activity of the A. shahii MH21-1<3 kDa fraction was unaffected by heat treatment (FIG. 6D).

[0565] Finally, the impact of growth medium dependent effects on IL-23 mediated STAT3 activation was analysed. CS prepared from strains grown in PYG medium exhibited potent STAT3 suppressive activities. Interestingly, there was no STAT3 suppressive activity when the strains were grown in Wilkins-Chalgren broth or MCM (FIG. 6E). This is consistent with previous reports (e.g., Giri et al., 2019; Schreiner et al., 2019) and suggests that the immunomodulatory activity A. shahii MH21-1 is affected by nutritional factors.

A. shahii Suppresses IL-6 Mediated Activation of STAT3.

[0566] Increased levels of the pro-inflammatory cytokine IL-6 and signalling via its receptor IL-6R is associated with IBD pathogenesis. Notably, IL-6 contributes to chronic inflammation in the gut due to its pro-inflammatory and anti-apoptotic effects on immune cells. These effects are mediated by IL-6 receptor binding which causes JAK kinase activation and STAT3 dimerization in combination with activation of MAPK/ERK and other downstream kinases. Here, the inventors examined whether A. shahii MH21-2 and A. shahii MH21-3 are able to suppress IL-6-mediated activation of STAT3 using the HEK-Blue™ IL-6 reporter cell line. The HEK-Blue™ IL-6 reporter cell line constitutively expresses the human IL-6 receptor and binding of IL-6 to the receptor triggers expression of a STAT3-responsive SEAP reporter. Tofacitinib was used as a control, and as expected, IL-6 mediated activation of STAT3 was fully prevented by tofacitinib (FIG. 6F). These data clearly show that A. shahii MH21-2 and A. shahii MH21-3 raw culture supernatant and its <3 kDa filtered fraction significantly suppress SEAP reporter activity. There was a modest effect on HEK cell viability (approximately 17% reduction relative to the medium control (range 14-21% reduction)) as assessed using an ATP assay.

A. shahii Promotes Human Intestinal Epithelial Cell Migration.

[0567] Damage of the intestinal barrier commonly occurs in IBD. The rapid migration of intestinal epithelial cells is a crucial component of the wound healing process to re-establish homeostasis. To investigate whether bioactives derived from A. shahii can affect the motility of intestinal epithelial cells, a TRANSWELL® migration assay was employed. HCT116 cells were seeded apically in a TRANSWELL® chamber and the ability of A. shahii extract to promote migration to the basolateral side of the chamber was assessed. A. shahii MH21-1 significantly promoted the migration of HCT116 cells to the basolateral side relative to the TYG-M medium extract control (FIG. 7A). The pro-migratory effects of A. shahii were further confirmed using the IncuCyte scratch wound assay. At 90 hours post induction of a scratch wound, HCT116 cells showed an accelerated rate of wound closure in the presence of extract from A. shahii MH21-1, compared to the control cells treated with TYG-M medium extract control (FIG. 7B).

A. shahii Supports Effective Gut Barrier Integrity.

[0568] Intestinal epithelial cells form a physical and biochemical barrier that separates host tissue from gut microbes and luminal contents (Peterson et al., 2014). Impaired gut barrier function has been implicated in the pathogenesis of several diseases including IBD (Vanuytsel et al., 2021) and has been proposed as a therapeutic target to improve disease outcomes (Sommer et al., 2021). The integrity of the gut epithelial cell barrier can be assessed using a simple, non-invasive method termed trans-epithelial electrical resistance (TEER). In the TEER assay, an electrical current in is applied across an epithelial cell layer and the resistance is measured. A reduction in the TEER value is indicative of a compromised barrier. To assess the ability of A. shahii to modulate barrier function, the TEER was monitored in T84 gut epithelial cell monolayers cultured with or without A. shahii MH21-1 culture supernatant, before and after barrier integrity was disrupted with IFN-γ. Following a 48-hour incubation with IFN-γ, a 90% drop in TEER was observed in T84 cells indicating an increased barrier permeability (FIG. 7 C, E). The treatment with A. shahii MH21-1 culture supernatant was not able to prevent this drop in TEER. However, after removal of the disruptor, a quicker increase in TEER indicating a faster recovery in barrier integrity could be observed in T84 cells in the presence of A. shahii MH21-1 culture supernatant compared to cells treated with bacterial medium PYG alone (FIG. 7 C, E). One week after IFN-γ was removed, the TEER of A. shahii MH21-1 treated cells was comparable to those cells that never received IFNγ treatment, whereas the cells treated with bacterial medium only still showed an almost 60% reduced TEER (FIG. 7 D, F).

[0569] The present inventors came to the realization that A. shahii produces metabolites that contribute to therapeutic efficacy. 34 metabolites (classified as Level 1 or 2a) were identified in the cell free culture supernatant that were ≥2-fold increase relative to the PYG medium control (Table 4). These included metabolites previously shown to modulate inflammation, immune cell infiltration, oxidative stress and barrier function (e.g., urocanic acid, allopurinol, N-acetyl-cysteine, ornithine, and propionylcarnitine, amongst others (see, Albert et al., 2010; Schlesinger et al., 2020; Shirazi et al., 2021; You et al., 2009; Qi et al., 2019; and Scioli et al., 2014).

TABLE 4
METABOLITES PRODUCED BY A. SHAHII
FOLLOWING GROWTH IN PYG MEDIUM

| Name | Fold change |
|---|---|
| Urocanic acid | 894.6551508 |
| Phenylacetic acid | 179.4364595 |
| 4-Methyl-2-oxovaleric acid | 163.5753332 |
| Glutamine | 121.6146497 |
| 5-Methylcytosine | 103.1114623 |
| Deoxyinosine | 103.0815557 |
| Thymine | 101.5947171 |
| 5-(Hydroxymethyl)uracil | 94.63791225 |
| 2-Oxo-3-phenylpropanoic acid | 76.02671611 |
| NAD+ | 61.30470622 |
| Succinic acid | 60.4820872 |
| Argininosuccinic acid | 38.01824958 |
| Uracil | 11.51841613 |
| Choline | 6.52417322 |
| Glycine | 6.180949626 |
| 4-Hydroxy-2,5-dimethyl-3(2H)- | 5.921702634 |
| furanone | |
| 1-Methyl Adenosine | 5.402707811 |
| 2′-Deoxyuridine | 4.335844251 |
| Alanine | 3.684617389 |
| Homocysteine | 3.310067513 |
| O-Acetyl-serine | 3.305068149 |
| Allopurinol | 3.154638493 |
| DOPA | 3.132608227 |
| Riboflavin | 3.09084237 |
| Propionylcarnitine | 2.906766968 |
| 4-Hydroxybenzaldehyde | 2.678856081 |
| Proline | 2.647814705 |
| Carbamoylaspartate | 2.492066105 |
| Ornithine | 2.282564761 |
| Inosine | 2.277347411 |
| Guanosine | 2.272928277 |
| Pyridoxal | 2.093546775 |
| N-Acetyl-cysteine | 2.041929474 |
| Crotonic acid | 2.02419823 |

### Materials & Methods

### Bacterial Strains, Culture Conditions and Analyses.

[0570] Stool samples were collected from healthy human adults with no history of gastrointestinal disorders and mixed with an equal weight per volume of sterile oxygen free glycerol solution (McSweeney, 2005). Donors had not consumed antibiotics in the three months prior to collection of the faecal samples. A. shahii and Faecalibacterium prausnitzii were routinely processed in a Coy vinyl anaerobic chamber with an oxygen free atmosphere (85% N₂:10% CO₂:5% H₂) atmosphere. A. shahii was routinely cultured in As_v1 or PYG medium while F. prausnitzii was cultured in TY medium. All isolates were stocked by mixing 3 mL of actively growing culture with an equal volume of glycerol solution (McSweeney, 2005) and storing at −80° C.

Isolation of A. shahii.

[0571] A. shahii strain MH21-1 was produced by inoculating a donor faecal sample with A. shahii present at a relative abundance of 0.24% into M4 broth. The enrichment culture was subsequently plated on Bacteroides Bile Esculin Agar and following growth colonies were picked into Schaedler broth. By this approach, an isolate was identified and termed A. shahii MH21-1 following whole genome sequencing. A. shahii strains MH21-2 and MH21-3 were produced from a donor faecal sample with A. shahii at 1.16% relative abundance. Briefly, 100 μl of a 7×10⁶ cell/ml microbial cell suspension prepared from the donor faecal sample was washed and then diluted 10-fold in an anaerobic buffered diluent solution (38 ml/L each of salt solutions 2 & 3 (McSweeney et al., 2005), 1 ml·L⁻¹ of 0.1% (w/v) resazurin solution, 1 g/L L-cysteine). The cells were stained with Syto-9 and propidium iodide according to the manufacturer's instructions (Thermo Fisher Scientific) and then serially diluted to 100 cells/ml. Microbial cells were dispensed using a Namocell Hana single cell dispenser (gating parameters were set to: FSCL=20, SSCL left open, FITCL=5) into a 96 well plate containing M2GSC medium supplemented with 10% v/v faecal water. An enrichment with A. shahii at 90% was identified and subsequently streaked on As_v1 medium. Distinct colonies with differing morphologies were subsequently purified by repeated streak on As_v1 medium. By this approach, two isolates termed A. shahii MH21-2 and MH21-3 were identified by whole genome sequencing.

[0572] To isolate A. shahii MH21-6, 1 mL of a faecal stock sample was mixed with a further 3 mL of 30% glycerol solution and vortexed for 2 minutes with ˜3.5 mm glass beads (Daintree Scientific) to dissociate bacteria from faecal debris. Aliquots of the dissociated bacteria were stored at −80° C. for later processing as necessary. Bacterial cells were sorted using a BD FACSAria™ Fusion Flow Cytometer with a 100 μm nozzle and small particle detector according to the manufacturer's instruction. The system was pressurised at 20 psi and events were triggered on scatter with thresholds set using 0.2 μm filtered PBS which allowed a few events from the noise floor. To sort bacterial cells, an aliquot was filtered through a 40 μm filter and a 10-3 dilution of the filtrate was subsequently prepared using a 0.2 μm filtered anaerobic buffered diluent solution (i.e., 38 ml/L each of salt solutions 2 & 3 (McSweeney et al., 2005). The diluted filtrate was run to determine the dilution resulting in 500-1200 events per second. Targets were gated on scatter and doublets were excluded (gating strategy shown in FIG. 7G). Single cells were deposited onto a TY agar plate and incubated at 37° C. for up to 3 weeks. Isolates were identified by whole genome sequencing following growth in TY broth. By this approach, an isolate affiliated with A. shahii was tentatively identified. The isolate was purified by repeated streaking of single colonies on TY agar. The final purified isolate was glycerol stocked and submitted for whole genome sequencing and by this approach an isolate termed A. shahii MH21-6 was produced.

### Metabolic Reconstruction.

[0573] Protein coding sequences were predicted and annotated using the annotate function in enrichM (version 0.5.2). Briefly, enrichM identifies protein coding sequences using prodigal (version 2.6.3) in -p meta mode. The amino acid sequences are then searched against the UniRef100 database (downloaded November 2020) using DIAMOND (version 2.0.4), and E.C., TCDB and eggnog classifications are inherited from the idmapping file distributed with UniRef. Hmmer hmmsearches (version 3.1b2) against Pfam (release 33.0), tigrfam (release 15.0) and dbcan2 (downloaded September 2019) were used to annotate functional domains, key metabolic markers and carbohydrate activate (CAZy) enymes, respectively. Metabolic pathways were identified using the classify function in enrichM, which assesses annotations and their genomic position against manually defined metabolic pathway definitions. A pathway is considered present in a genome if it encoded >80% of the required proteins, and passes all required synteny checks. These automatically predicted pathways were then manually assessed. In addition, gutSMASH (version 1.0.0) was applied to identify common biosynthetic pathways encoded by gut microorganisms.

### Phylogenetic Tree

[0574] A genome tree was constructed from high quality genomes, defined as >90% complete and ≤55% contamination from checkM analysis, within the Alistipes genus (NCBI release 89) and the four MH21 isolates. For each genome, a set of 122 bacteria-specific conserved marker genes were extracted from each genome using gtdbtk identify. These genes were the aligned to profile HMMs and concatenated to a single alignment with gtdbtk align, and a Maximum likelihood phylogenetic tree was constructed from the alignments using FastTree (version 2.1.10) with gtdbtk infer. Non-parametric bootstrap values were inferred using GenomeTreetk (v0.1.6) from 1000 repetitions.

### Preparation of Bacterial Strains for Animal Experimentation.

[0575] A. shahii and F. prausnitzii strains were grown to early stationary phase in As_v1 and TY medium respectively. The cell density of the individual cultures was calculated using a Helber Counting Chamber. To prepare the bacterial gavage solutions, individual cultures were centrifuged under a layer of sterile heavy mineral oil at 5,000 g for 10 minutes and the cell-free supernatant was then discarded. The cell pellets were washed in 1.5 mL of sterile anaerobic buffered diluent (38 mL/L each of salt solutions 2 & 3 (McSweeney et al., 2005), 1 mL/L of 0.1% (w/v) resazurin solution, 1 g/L L-cysteine) and then centrifuged again. Finally, the washed cell pellet was resuspended in half strength glycerol solution (15% v/v glycerol solution in anoxic buffered diluent) to a final concentration of 1×10⁹ cells/mL, aliquoted and frozen at −80° C. until required. The viability of the cell preparations was confirmed by thawing a single aliquot and streaking on an agar plate. The identity and purity of the individual strain preparations was confirmed by whole genome sequencing.

### Acute Model of DSS-Induced Gut Barrier Dysfunction.

[0576] Six-week-old C57BL/6 female mice purchased from Animal Resources Centres (Western Australia, Australia) were randomised and then co-housed for seven days prior to experimentation. To induce gut barrier dysfunction, mice were treated with 3% DSS ad libiteum in the drinking water for six days. Naïve age matched control mice were processed and received DSS free drinking water. All treatments started one day prior to provision of DSS and all mice were sacrificed two days after the final DSS treatment. For the treatments, mice were anesthetised with isofluorane and orally gavaged with 200 μl of bacterial preparations or vehicle control. Prednisone (2 mg/kg) was administered following anesthetisation by intraperitoneal injection. Body weights and stool consistency were recorded daily. Stool samples were collected daily. Following sacrifice, the colon, liver and spleen were collected for analysis. Blood was collected by cardiac puncture.

### Endoscopic and Histological Scoring.

[0577] Animals were examined with a small animal gastrointestinal endoscope (Karl Storz Endoskope, Tuttlingen, Germany) on days 1, 2 and 6 to assess the extent of colon mucosal inflammation (Marks et al., 2015; and Liu et al., 2019). Briefly, mice were anesthetised with isoflurane and a colonoscope was inserted through the rectum. Images captured by high-definition videos were examined in a blinded manner to assess the presence and extent of disease pathologies (Table 5). Histological scoring was performed essentially as previously described in the art (Marks et al., 2015). Briefly, samples were fixed in 4% formalin, paraffin embedded and sectioned. Tissue sections were hematoxylin and eosin stained to assess disease pathology and with Alcian blue to assess mucin production. Slides were imaged using the Aperio digital imaging system (Leica Biosystems, NuBloch, Germany). To grade colitis severity, the extent of inflammation and epithelial injury in the tissue sections were graded semi-quantitatively using an established scoring system (Table 6). The samples were then randomised and subsequently scored in a blinded by a trained gastrointestinal pathologist.

TABLE 5
Scoring of Gut Barrier Dysfunction by Colonoscopy

| Feature | Scoring |
|---|---|
| Thickening of the colon wall | |
| Transparent | 0 |
| Moderate | 1 |
| Marked | 2 |
| Intransparent | 3 |
| Changes in vascular pattern | |
| Normal | 0 |
| Moderate | 1 |
| Marked | 2 |
| Bleeding | 3 |
| Granularity of the mucosal surface | |
| None | 0 |
| Moderate | 1 |
| Marked | 2 |
| Extreme | 3 |
| Stool consistency/mucus secretion | |
| Normal and solid | 0 |
| Still shaped, mild mucus | 1 |
| Unshaped, mucus | 2 |
| Spread | 3 |
| Extent of involved area | |
| 0-5% (none) | 0 |
| 5-20% (patchy) | 1 |
| 20-50% (moderate) | 2 |
| >50% (predominant) | 3 |

TABLE 6
SCORING OF HISTOLOGICAL COLITIS

Inflammation score (Scored 0-4)

| | |
|---|---|
| 0 | No evidence of inflammation |
| 1 | Low level of inflammation with scattered |
| | infiltrating mononuclear cells (1-2 foci only) |
| 2 | Moderate inflammation with multiple foci |
| 3 | High level of inflammation with increased |
| | vascular density and marked wall thickening |
| 4 | Maximal severity of inflammation with |
| | transmural leukocyte infiltration and loss of |
| | goblet cells |

Injury score (Scored 0-3)

| | |
|---|---|
| 0 | No epithelial injury |
| 1 | Occasional epithelial leison |
| 2 | 1-2 foci of ulceration |
| 3 | Extensive ulceration |

Colitis activity (Composite score (/17) based on measures listed below)

| | |
|---|---|
| Hypervascularisation | 0-3 based on severity |
| Presence of mononuclear cells | 0-3 based on severity |
| Epithelial hyperplasia | 0-3 based on severity |
| Epithelial injury | 0-3 based on severity |
| Presence of neutrophils | 0-3 based on severity |
| Lymphoid aggregates | Scored 0-2, where 0 = 0, 1 = ≤2, and 2 = ≥2 |

### SKG Model of Murine Ileitis.

[0578] Five-week-old SKG female mice (n=3 male; n=3 female) were randomised and then co-housed for 3 weeks prior to experimentation. To induce disease, mice were administered curdlan (1,3-β-glucan, 3 mg per mouse) intraperitoneal (i.p.). Naïve age matched control mice were similarly processed except that they were administered saline i.p. All treatments started prior to administration of curdlan, and all mice were sacrificed 7 days after the curdlan treatment. For the bacterial treatments, mice were orally gavaged with 200 μl of bacterial preparations or vehicle control starting 2 days prior to the curdlan administration. Anti-mouse IL-23 p19 monoclonal antibody (Thermo Fisher, 30 μg per mouse) was administered by i.p. injection one day prior to curdlan administration. Stool samples were collected daily. Body weights were measured at Day −2. 0 and 7. Following sacrifice, the colon, distal small intestine, mesenteric lymph nodes and spleen were collected for analysis. Blood was collected by cardiac puncture.

### Clinical and Histological Scoring.

[0579] Histological scoring was performed essentially as described by Benham et al., (2014). Briefly, samples were fixed in 4% formalin, paraffin embedded and sectioned. Tissue sections were hematoxylin and eosin stained to assess disease pathology and with Alcian blue for goblet cell assessment. Slides were imaged using an Olympus VS120 slide scanner (Olympus Corporation, Tokyo, Japan). To grade ileitis severity, the extent of inflammation and epithelial injury in the tissue sections were graded semi-quantitatively using an established scoring system (see, Table 7, Benham et al., (2014)). The samples were then randomised and subsequently scored in a blinded manner by an independent trained pathologist.

[0580] To characterise the cytokines present in serum, the mice were euthanised by CO₂ asphyxiation after which blood was collected by cardiac bleed and serum isolated by centrifugation. Serum samples were stored at −80° C. These serum samples were subsequently thawed and used in the LEGENDplex Mouse Inflammation Panel (13-plex) (BioLegend, Cat. 740446) to determine effects on cytokine production (IL-23, IL-1α, IFN-γ, TNF, MCP-1, IL-12p70, IL-1β, IL-10, IL-6, IL-27, IL-17A, IFN-β, GM-CSF). Serum samples were diluted 2-fold and then incubated with capture beads conjugated to an antibody against specific analyte. After washing, a biotinylated detection antibody mixture is added to create a “capture bead-analyte-detection antibody” sandwich. Streptavidin-phycoerythrin (SA-PE) is added to bind to the biotinylated detection antibodies. After a final wash, the mixtures are analyzed by flow cytometry where the beads are differentiated by size and internal fluorescence intensities. Cytokine concentration is determined by PE fluorescence and comparison to a standard curve of known cytokine concentrations using BioLegend's LEGENDplex data analysis software. The unique size and fluorescence characteristics of the beads allows for the simultaneous measurement of 13 cytokines.

TABLE 7
Histological scoring system for ileum of SKG mice

| Feature | Grade | Description |
|---|---|---|
| Inflammatory | 0 | Absent |
| infiltrate | | |
| | 1 | Scattered PMNs or MNs in lamina propria (LP) |
| | | involving <5 intercryptal spaces contiguously involved |
| | | in an area |
| | 2 | Increased PMNs or MNs in LP and/or submucosa |
| | | involving >5 intercryptal spaces contiguously involved |
| | | in an area and ± crypt abscesses and areas of |
| | | crypt/villous loss <5 crypt widths |
| | 3 | Extensive transmural inflammatory infiltrate andareas |
| | | of crypt/villous loss >5 crypt widths and/or confluent |
| | | areas of crypt abscesses and/or mucosal |
| | | erosion/ulceration |
| Granulomata | 0 | Absent |
| | 1 | Aggregation of cells not definitely a granuloma |
| | 2 | A definite granuloma formation present |
| | 3 | Multiple granulomas present |
| Villous Distortion | 0 | Absent |
| | 1 | Villus height increased or decreased by <⅓ of |
| | | normal |
| | 2 | Villus height increased or decreased by ⅓-⅔ of |
| | | normal |
| | 3 | Villus height increased or decreased by >⅔ of |
| | | normal |

| Cross sectional area | Score |
|---|---|
| <1% | 0.5 |
| 1-25% | 1 |
| 26-50% | 2 |
| 51-75% | 3 |
| >75% | 4 |

For total histology score add scores from sections 1, 2 and 3 and multiply by cross sectional area involved.

### Characterisation of STAT3 Suppressive Activity.

[0581] To assess STAT3 suppressive activity of A. shahii MH21-1 and MH21-3, three independent colonies were inoculated and grown until early stationary phase. Then, each seed culture broth was used to inoculate two technical replicates each generating six technical replicates from three biological replicates. The technical replicates were grown until early stationary phase and then cell free culture supernatant was harvested as previously described (Giri et al., 2019). Culture supernatants were size fractionated by passing through a 3 kDa CENTRICON® column according to the manufacturer's (Merck Millipore) instructions. To prepare A. shahii MH21-6 supernatant samples for assay, a seed culture was established from a single colony and grown until early stationary phase. Then, the seed culture broth was used to inoculate two technical replicates. The technical replicates were grown until early stationary phase and then cell free culture supernatant was harvested as previously described (Giri et al., 2019). Culture supernatants were size fractionated by passing through a 3 kDa CENTRICON® column according to the manufacturer's (Merck Millipore) instructions.

[0582] STAT3 activity was assessed using the HEK Blue IL-23 cell line (Invivogen). Briefly, 50,000 cells per well were seeded in triplicate in a 96-well plate 24 hours prior to the start of the assay. Bacteria supernatant or sterile bacterial medium were mixed at a final concentration of 10%, 25%, or 50% v/v with recombinant human IL-23 (rhIL-23, R&D systems) at a final concentration of 5 ng/mL. This mixture was then added directly to the cells and incubated at 37° C. for 6 hours. The ability of the supernatants to suppress STAT3 activation was compared to the Janus kinase inhibitor tofacitinib (10 μM). STAT3 regulated SEAP reporter activity was assessed using Quanti Blue solution as recommended by the manufacturer (Invivogen). Results are the average of at least three independent experiments. Cytotoxicity was assessed using an MTT assay. Briefly, MTT reagent was added to the cells at a final concentration of 1.2 mM. The cells were incubated at 37° C. for 4 hours and then fixed with DMSO. Cytotoxicity was assessed by measuring absorbance at 540 nm as recommended by the manufacturer (Invitrogen, Thermo Fisher, Australia).

[0583] STAT3 activity was assessed using the HEK Blue IL-6 cell line (Invivogen). Briefly, 50,000 cells per well were seeded in triplicate in a 96-well plate 24 hours prior to the start of the assay. Bacteria supernatant or sterile bacterial medium were added to the cells at a final concentration of 10% v/v for a 60-minute pretreatment. Then recombinant human IL 6 (R&D systems) was added at a final concentration of 2 ng/mL and the cells were incubated at 37° C. for 24 hours. The ability of the supernatants to suppress IL-6 mediated STAT3 activation was compared to the Janus kinase inhibitor tofacitinib (10 μM). After 24 hours, the STAT3 regulated SEAP reporter activity was assessed using Quanti Blue solution as recommended by the manufacturer (Invivogen). Results are the average of three independent experiments. Cytotoxicity was assessed using the CellTiter-Glo® 2.0 Cell Viability Assay (Promega, Australia) as recommended by the manufacturer.

### Cell Migration Assay.

[0584] The IncuCyte® Live-Cell Imaging System (Essen BioScience) and Transwell migration assay were used to assess the migration of HCT116 cells during exposure to sterile culture supernatant extracts from A. shahii. These bacterial extracts were prepared using an Amberlite XAD-7 resin essentially as previously described by Colosimo et al., (2019). Briefly, a single colony was inoculated and grown until early stationary phase. This “seed culture” broth was used to inoculate 600 ml of broth and the culture was incubated until early stationary phase. Culture supernatants were prepared by centrifuging the culture at 4000 g for 30 minutes and then passing the cell free supernatant through a 3 kDa filter according to the manufacturer's instructions (Sartorius Vivaflow® 50 Ultrafiltration Unit 3 kDa MWCO PES). Activated Amberlite XAD-7 resin was added to 400 mL of 3 kDa filtered cell-free supernatant (10% w/v), and the slurry was gently shaken overnight at 4° C. The resin was collected, washed with 400 mL of deionized water and then mixed with 120 mL of 100% methanol. Following 2 h incubation with gentle shaking, the methanol elution was collected. A second elution in 120 mL of 100% methanol was performed as previously described and the two elutions were ultimately combined and dried under vacuum using a rotary evaporator. The extract was fully resuspended at in 100% DMSO (thereafter referred to as 1000×) and stored at −20° C.

[0585] Human HCT116 gut epithelial cells were maintained in McCoys 5a medium supplemented with 10% FBS and 1% Pen/Strep. For the IncuCyte® scratch wound assay, 3.5×10⁴ HCT116 cells were plated on poly-L-ornithine-coated IncuCyte® ImageLock 96-well plates (Essen BioScience). After 24 hours, the IncuCyte® WoundMaker tool was used to induce a homogeneous scratch wound in the nearly confluent cell monolayer. The cells were washed twice with DPBS and then 0.6× extract from A. shahii in 200 μL 0.5% FBS McCoys 5a medium was added. Uninoculated bacterial media (1%) served as negative control. Immediately after adding the stimulants, the plate was transferred to the IncuCyte® system and cell migration was monitored by imaging each well every 2 hours over the course of 90 hours. Data analysis was performed using the integrated analysis software.

[0586] To assess cell migration via the TRANSWELL® assay, 3.5×10⁴ HCT116 cells were seeded in 100 μL 10% FBS culture medium in the top compartment of a 6.5 mm insert with TC-treated polycarbonate membrane in 24-well plates (8 μm pore size, Corning Costar). 600 μL 10% FBS culture medium was added to the lower compartment. The cells were allowed to settle for 24 hours. After a DPBS wash, 100 μL and 600 μL of 0.5% FBS medium was added to the top and lower compartment, respectively. Then, 1× concentrated extract from A. shahii was added to the lower compartment. After 16 hours, the cells were washed with DPBS and the cells attached to the top of the membrane were carefully removed with a cotton tip. The migrated cells on the bottom of the membrane were then fixed in 70% ethanol for 10 minutes followed by staining in 0.25% crystal violet for 5 minutes. The TRANSWELL® inserts were washed with water, dried and the membrane mounted with 50% glycerol in water on glass slides and imaged immediately. TRANSWELL® experiments were performed in biological and technical triplicates and for each replicate two representative images of the membrane were taken at 10× magnification. The number of migrated cells was automatically counted using ImageJ and the average cell number displayed. The extent of cell migration was expressed as the average number of migrated cells in two microscopic fields per well from three biological and three technical replicates.

### Epithelial Barrier Integrity Assay Using Trans-Epithelial Electrical Resistance (TEER).

[0587] The ability of A. shahii to modulate barrier integrity was assessed by measuring the transepithelial electrical resistance across confluent monolayers of T84 gut epithelial cells. T84 cells were purchased from CellBank Australia and cultured in Dulbecco's Modified Eagle Medium Nutrient Mixture 12 (DMEM/F12; ThermoFisher Scientific, Waltham, MA, USA) supplemented with 5% foetal bovine serum and 1% Penicillin-Streptomycin. T84 cells were seeded into 24-well Millicell polycarbonate cell culture inserts with 0.4 μm pore size (Merck Millipore, PSHT010R5) at a density of 60.000 cells per well in 400 μL warm T84 medium, and 24 mL of medium was added into the single-well feeder tray. Medium changes of both compartments were performed every second day. After seven days of culture, the upper part of the plate assembly with cell culture inserts were transferred from the feeder tray to a 24-well receiver tray (Merck Millipore, PSMW010R5), with each well containing 800 μL media. TEER values of each well were then measured daily using the Millicell ERS-2 Voltohmmeter. Experiments were started once the cells in all wells reached stable TEER readings above 1500Ω. Tofacitinib (75 μM) was used as control known to accelerate restoration of barrier function (Sayoc-Becerra et al., 2020). In a prophylactic model, T84 cells were pretreated with 3 kDa-filtered MH21 bacterial supernatant as well as 3 kDa-filtered bacterial medium (PYG) as negative control. Both were diluted to 10% in T84 medium and added to the apical compartment. After one hour of pretreatment, IFN-γ (50 ng/mL) was added basolateral to disrupt barrier integrity, in addition to the apical treatment with A. shahii MH21-1 supernatant. After 48 hours, all wells were washed thoroughly with warm PBS to remove the disruptor IFN-γ. From then on, the A. shahii MH21-1 supernatant and control treatments in the apical chamber, and the T84 medium in the basolateral chamber, were refreshed every 24 hours, and the TEER values were measured daily in duplicate. The data from two biological replicates with duplicate measurements each were presented either as raw TEER value in Q or as the percentage difference in TEER value compared to the untreated T84 cells. Statistical significance was determined by unpaired t-test.

Metabolomic Analysis of A. shahii

[0588] To assess the metabolites produced by A. shahii, six independent colonies were inoculated and grown until early stationary phase. Then, each seed culture broth was used to inoculate two technical replicates of YG/V generating 12 technical replicates from six biological replicates. The technical replicates were grown until early stationary phase and then cell free culture supernatant was harvested following centrifugation at 12,550 g for 3 minutes in an anaerobic chamber. Culture supernatants were snap frozen on dry ice and then stored at −80° C. until testing.

[0589] Sample analysis was carried out by MS-Omics (Denmark) as follows. The analysis was carried out using a Thermo Scientific Vanquish LC coupled to Thermo Q Exactive HF MS. An electrospray ionization interface was used as ionization source. Analysis was performed in negative and positive ionization mode. The UPLC was performed using a slightly modified version of the protocol described by Catalin et al. (UPLC/MS Monitoring of Water-Soluble Vitamin Bs in Cell Culture Media in Minutes, Water Application note 2011, 720004042en). Peak areas were extracted using Compound Discoverer 3.1 (Thermo Scientific). Identification of compounds were performed at four levels; Level 1: identification by retention times (compared against in-house authentic standards), accurate mass (with an accepted deviation of 3 ppm), and MS/MS spectra, Level 2a: identification by retention times (compared against in-house authentic standards), accurate mass (with an accepted deviation of 3 ppm). Level 2b: identification by accurate mass (with an accepted deviation of 3 ppm), and MS/MS spectra, Level 3: identification by accurate mass alone (with an accepted deviation of 3 ppm).

### Example 2

Colonithrix Association with Health, IBD and Other Diseases.

[0590] Inflammatory bowel disease is characterised by structure-function changes to the microbiome with a significant reduction in both the prevalence and abundance of select gut bacteria in the IBD gut when compared to the healthy gut. Several studies have shown that these bacteria may modulate IBD pathogenesis (Mallone et al., 2011; and Sokol et al., 2008) however a key obstacle to using these bacteria to develop new therapeutics has been that low resolution 16S rRNA based profiling do not provide sufficient resolution to accurately discriminate against health and IBD associated strains at a low taxonomic level (i.e., genus, species, strain).

[0591] The inventors used the Microba Disease Database (MDD), which contains high resolution faecal gut metagenomic data and associated host metadata for 6,020 adults, to study the prevalence of Colonithrix species in inflammatory and autoimmune diseases. Metagenomic sequence reads were analysed using the Microba Community Profiler (MCP) (Parks et al., 2021).

[0592] Three Colonithrix species were detected in more than two individuals in the MDD: C. sana, and the uncultured species C. sp900317525 and C. sp003522105.

[0593] The inventors found the Colonithrix species as being prevalent in healthy humans but rarely detected in inflammatory and autoimmune diseases (FIG. 7A-D). The strongest effect was observed for IBD, including both major subtypes ulcerative colitis and Crohn's disease (FIG. 8, and Table 8, below). The genus Colonithrix was significantly less prevalent in IBD compared to healthy individuals (P=7.3E-17, FDR=8.77E-15). Accordingly, all three Colonithrix species (C. sana, C. sp900317525, C. sp003522105) were significantly less prevalent in IBD as compared to healthy (FIG. 8, Table 8). The strongest reduction in IBD was observed for C. sana (FIG. 8, Table 8). These observations were validated in an independent IBD cohort previously published by Harvard ((Franzosa et al., 2018), FIG. 8, Table 8).

TABLE 8
ASSOCIATION STATISTICS BETWEEN COLONITHRIX SPECIES AND IBD

| | | | | | | | P Cochran- |
|---|---|---|---|---|---|---|---|
| | | | | | | | Mantel- |
| | PREVALENCE (%) | | | | | | Haenszel test |
| | Healthy | CD | UC | Healthy | CD | UC | association |
| Taxon | MDD | MDD | MDD | Harvard | Harvard | Harvard | with IBD |
| Colonithrix sana | 82.4 | 32.6 | 48.8 | 69.6 | 6 | 37.7 | 8.7E−24 |
| Colonithrix | 73.9 | 27.9 | 39 | 39.1 | 1.5 | 21.3 | 5.70E−18 |
| sp900317525 | | | | | | | |
| Colonithrix | 24.4 | 7 | 2.4 | 13 | 0 | 11.5 | 4.80E−07 |
| sp003522105 | | | | | | | |

### Isolation and Genome-Scale Analysis of C. Sana

[0594] To better understand the role of C. sana in health and the pathogenesis of IBD two new isolates, termed C. sana MH35-1 and C. sana MH35-2, were isolated from a healthy human donor. The isolation was performed by generating a dilution-to-extinction enrichment and then plating for single colonies. C. sana MH35-1 and C. sana MH35-2 grew on TY and PYG based media and were typically observed as a Gram-variable staining long thin rod like cells (FIG. 9A) although cell morphology significantly more heterogenous in older cultures. Phylogenetic reconstruction of the ER4 genus using high-quality GenBank and RefSeq genomes from the NCBI and C. sana MH35-1 and C. sana MH35-2 revealed the isolates placed with high confidence within the C. sana clade, close to several uncultured species (FIG. 9B), and close to the CAG-83 and Oscillibacter genera. C. sana MH35-1 and C. sana MH35-2 are likely amino acid fermenters, but are predicted to utilise glucose. Complete, or near complete biosynthetic pathways were identified for alanine, arginine, asparagine, aspartic acid, glutamine, glutamic acid, glycine, leucine, proline and serine Several pathways for the uptake and fermentation of amino acids (asparagine, aspartic acid, glutamic acid, histidine, isoleucine, cysteine and leucine) were identified. Metabolic modelling of the C. sana MH35-1 and C. sana MH35-2 isolates revealed that when fed with glucose and amino acids, primary byproducts of fermentation are acetate and ammonia. AntiSmash identified a RiPP ranthipeptide BGC in both strains with no close homology to BGCs in public databases.

C. sana Enhances Gut Barrier Function

[0595] It was hypothesised that the big-data approach described above could be used to identify novel candidate live biotherapeutics for inflammatory and autoimmune diseases (e.g., IBD). The inventors therefore tested the therapeutic efficacy of C. sana MH35-1 and C. sana MH35-2 in an acute model of DSS induced murine colitis (FIG. 10A) as this is a well-documented model of epithelial injury and repair. DSS treatment resulted in significant disease activity relative to the vehicle control. Histological analysis of DSS treated mice revealed significant gut damage characterized by crypt loss, epithelial erosion and ulceration. Notably, treatment with C. sana MH35-1 and C. sana MH352 resulted in significant improvement in pathology as evidenced by improvements in histopathological healing (FIG. 10B) and a reduction in epithelial injury (FIG. 10C). Neither prednisone nor F. prausnitzii A2-165 had a significant impact on histopathological healing or epithelial injury (FIG. 10B-C). Taken together, these data revealed that C. sana MH35-1 and C. sana MH35-2 promoted mucosal healing in DSS treated C57Bl/6 mice.

C. sana Suppresses IL-23 Mediated Activation of STAT3 In Vitro

[0596] Given the dramatic effects on histological inflammation and re-epithelialisation observed in the DSS treated animals, the inventors next examined the ability of C. sana MH35-1 and C. sana MH35-2 to modulate IBD associated immune pathways. IL-23 driven immune responses are central to the pathogenesis of IBD and are a clinically recognised target (Friedrich et al., 2019; Yang et al., 2017). The inventors examined the ability of C. sana MH35-1 and C. sana MH35-2 to suppress IL-23-mediated activation of STAT3 using the HEK-Blue™ IL-23 reporter cell line. The HEK-Blue™ IL-23 reporter cell line carries a STAT3 inducible SEAP reporter that is responsive to IL-23 stimulation. As expected, IL-23 mediated activation of STAT3 could be prevented by tofacitinib (FIG. 11A-B). Interestingly, cell free culture supernatant prepared from C. sana MH35-1 and C. sana MH35-2 grown in PYGM medium suppressed SEAP reporter activity (FIG. 11A-B). Notably, no changes were observed in cell morphology following treatment with the C. sana MH35-1 and C. sana MH35-2 culture supernatants suggesting the supernatants were not toxic.

C. sana Suppresses IL-6 Mediated Activation of STAT3.

[0597] Increased levels of the pro-inflammatory cytokine IL-6 and signalling via its receptor IL-6R is associated with IBD pathogenesis. Notably, IL-6 contributes to chronic inflammation in the gut due to its pro-inflammatory and anti-apoptotic effects on immune cells. These effects are mediated by IL-6 receptor binding which causes JAK kinase activation and STAT3 dimerization in combination with activation of MAPK/ERK and other downstream kinases. Here, the inventors examined whether C. sana MH35-1 and C. sana MH35-2 are able to suppress IL-6-mediated activation of STAT3 using the HEK-Blue™ IL-6 reporter cell line. The HEK-Blue™ IL-6 reporter cell line constitutively expresses the human IL-6 receptor and binding of IL-6 to the receptor triggers expression of a STAT3-responsive SEAP reporter. Tofacitinib was used as a control, and as expected, IL-6 mediated activation of STAT3 was fully prevented by tofacitinib (FIG. 12A, B). It was shown that C. sana MH35-1 and C. sana MH35-2 raw culture supernatant and its <3 kDa filtered fraction significantly suppressed SEAP reporter activity (FIG. 12A, B). Moreover, <3 kDa filtered culture supernatant Amberlite extract from both C. sana MH35-1 and C. sana MH35-2 suppressed SEAP reporter activity by nearly 65% (FIG. 12C). In both experiments, there was a minimal effect on HEK cell viability (9% reduction) as assessed using an ATP assay.

C. sana Promotes Human Intestinal Epithelial Cell Migration.

[0598] Damage of the intestinal barrier commonly occurs in IBD. The rapid migration of intestinal epithelial cells is a crucial component of the wound healing process to re-establish homeostasis. To investigate whether bioactives derived from C. sana can affect the motility of intestinal epithelial cells, a TRANSWELL® migration assay was employed. HCT116 cells were seeded apically in a TRANSWELL® chamber and the ability of C. sana MH35-1 and C. sana MH35-2 extract to promote migration to the basolateral side of the chamber was assessed. Untreated cells had a basal level of migration to the basolateral side of the membrane, and this was unaffected by treatment with PYGM medium (FIG. 12A). C. sana MH35-1 and C. sana MH35-2 significantly promoted the migration of HCT116 cells to the basolateral side (FIG. 13A). The pro-migratory effects of C. sana were further confirmed using the IncuCyte scratch wound assay. Within 72 hours post induction of a scratch wound, HCT116 cells showed an accelerated rate of wound closure in the presence of extract from C. sana MH35-1 and C. sana MH35-2, compared to the control cells treated with PYGM medium (FIG. 13B, C).

### Materials & Methods

### Bacterial Strains, Culture Conditions and Analyses.

[0599] Stool samples were collected from healthy human adults with no history of gastrointestinal disorders and mixed with an equal weight per volume of sterile oxygen free glycerol solution (McSweeney, 2005). Donors had not consumed antibiotics in the three months prior to collection of the faecal samples. C. sana and Faecalibacterium prausnitzii were routinely processed in a Coy vinyl anaerobic chamber with an oxygen free atmosphere (85% N₂:10% CO₂:5% H₂) atmosphere. C. sana was routinely cultured in a modified PYG medium (PYGM, Table 1) while F. prausnitzii was cultured in TY medium (Table 1). All isolates were stocked by mixing 3 mL of actively growing culture with an equal volume of glycerol solution (McSweeney, 2005) and storing at −80° C.

Isolation of C. sana.

[0600] An isolate of C. sana was produced by inoculating a donor faecal sample with C. sana present at a relative abundance of 1.2% into custom broth (Table 1) and then serially diluting to extinction. The dilution-to-extinction culture series was sequenced and a low diversity enrichment culture with C. sana at a relative abundance of 6.6% was identified, Colonies were recovered and subsequently arrayed on TY medium. Arrayed isolates were screened by PCR using species specific primers and two putative C. sana isolates were identified and subsequently purified. By this approach, Gram-viable staining isolates with a long thin rod cell morphology were identified and termed C. sana MH35-1 and C. sana MH35-2 following whole genome sequencing.

### Metabolic Reconstruction.

[0601] Protein coding sequences were predicted and annotated using the annotate function in enrichM (version 0.6.2). Briefly, enrichM identifies protein coding sequences using prodigal (version 2.6.3) in -p meta mode. The amino acid sequences are then searched against the UniRef100 database (downloaded November 2020) using DIAMOND (version 2.0.4), and E.C., TCDB and eggnog classifications are inherited from the idmapping file distributed with UniRef. Hmmer hmmsearches (version 3.1b2) against Pfam (release 33.0), tigrfam (release 15.0) and dbcan2 (downloaded September 2019) were used to annotate functional domains, key metabolic markers and carbohydrate activate (CAZy) enymes, respectively. Metabolic pathways were identified using the classify function in enrichM, which assesses annotations and their genomic position against manually defined metabolic pathway definitions. A pathway is considered present in a genome if it encoded >80% of the required proteins, and passes all required synteny checks. These automatically predicted pathways were then manually assessed. In addition, gutSMASH (version 1.0.0) was applied to identify common biosynthetic pathways encoded by gut microorganisms.

### Phylogenetic Tree.

[0602] A genome tree was constructed from high quality genomes, defined as ≥90% complete and ≤55% contamination from checkM analysis, within the Colonithrix genus (NCBI release 89) and the two C. sana MH35 isolates. For each genome, a set of 122 bacteria-specific conserved marker genes were extracted from each genome using gtdbtk identify. These genes were the aligned to profile HMMs and concatenated to a single alignment with gtdbtk align, and a Maximum likelihood phylogenetic tree was constructed from the alignments using FastTree (version 2.1.10) with gtdbtk infer. Non-parametric bootstrap values were inferred using GenomeTreetk (v0.1.6) from 1000 repetitions.

### Preparation of Bacterial Strains for Animal Experimentation.

[0603] C. sana and F. prausnitzii strains were grown to early stationary phase PYGM and TY medium, respectively. The cell density of the individual cultures was calculated using a Helber Counting Chamber. To prepare the bacterial gavage solutions, individual cultures were centrifuged under a layer of sterile heavy mineral oil at 5,000 g for 10 minutes and the cell-free supernatant was then discarded. The cell pellets were washed in 1.5 mL of sterile anaerobic buffered diluent (38 mL/L each of salt solutions 2 & 3 (McSweeney et al., 2005), 1 mL/L of 0.1% (w/v) resazurin solution, 1 g/L L-cysteine) and then centrifuged again. Finally, the washed cell pellet was resuspended in half strength glycerol solution (15% v/v glycerol solution in anoxic buffered diluent) to a final concentration of 1×10⁹ cells/mL, aliquoted and frozen at −80° C. until required. The viability of the cell preparations was confirmed by thawing a single aliquot and streaking on an agar plate. The identity and purity of the individual strain preparations was confirmed by whole genome sequencing.

### Acute Model of DSS-Induced Gut Barrier Dysfunction.

[0604] Six-week-old C57BL/6 female mice purchased from Animal Resources Centres (Western Australia, Australia) were randomised and then co-housed for seven days prior to experimentation. To induce gut barrier dysfunction, mice were treated with 3% DSS ad libiteum in the drinking water for six days. Naïve age matched control mice were processed and received DSS free drinking water. All treatments started one day prior to provision of DSS and all mice were sacrificed two days after the final DSS treatment. For the treatments, mice were anesthetised with isofluorane and orally gavaged with 200 μl of bacterial preparations or vehicle control. Prednisone (2 mg/kg) was administered following anesthetisation by intraperitoneal injection. Body weights and stool consistency were recorded daily. Stool samples were collected daily. Following sacrifice, the colon, liver and spleen were collected for analysis. Blood was collected by cardiac puncture.

### Endoscopic and Histological Scoring.

[0605] Animals were examined with a small animal gastrointestinal endoscope (Karl Storz Endoskope, Tuttlingen, Germany) on days 1, 2 and 6 to assess the extent of colon mucosal inflammation (Marks et al., 2015; and Liu et al., 2019). Briefly, mice were anesthetised with isoflurane and a colonoscope was inserted through the rectum. Images captured by high-definition videos were examined in a blinded manner to assess the presence and extent of disease pathologies (Table 5). Histological scoring was performed essentially as previously described in the art (Marks et al., 2015). Briefly, samples were fixed in 4% formalin, paraffin embedded and sectioned. Tissue sections were hematoxylin and eosin stained to assess disease pathology and with Alcian blue to assess mucin production. Slides were imaged using the Aperio digital imaging system (Leica Biosystems, NuBloch, Germany). To grade colitis severity, the extent of inflammation and epithelial injury in the tissue sections were graded semi-quantitatively using an established scoring system (Table 6). The samples were then randomised and subsequently scored in a blinded by a trained gastrointestinal pathologist.

### Characterisation of STAT3 Suppressive Activity.

[0606] To assess STAT3 suppressive activity, three independent colonies of C. sana MH35-1 and C. sana MH35-2 were inoculated and grown until early stationary phase. Then, each seed culture broth was used to inoculate two technical replicates each generating six technical replicates from three biological replicates. The technical replicates were grown until early stationary phase and then cell free culture supernatant was harvested as previously described (Giri et al., 2019). Culture supernatants were size fractionated by passing through a 3 kDa CENTRICON® column according to the manufacturer's (Merck Millipore) instructions.

[0607] STAT3 activity was assessed using the HEK Blue IL-23 cell line (Invivogen). Briefly, 50,000 cells per well were seeded in triplicate in a 96-well plate 24 hours prior to the start of the assay. Bacteria supernatant or sterile bacterial medium were mixed at a final concentration of 25% v/v with recombinant human IL-23 (rhIL-23, R&D systems) at a final concentration of 5 ng/mL. This mixture was then added directly to the cells and incubated at 37° C. for 6 hours. The ability of the supernatants to suppress STAT3 activation was compared to the Janus kinase inhibitor tofacitinib (10 μM). STAT3 regulated SEAP reporter activity was assessed using Quanti Blue solution as recommended by the manufacturer (Invivogen). Results are the average of at least three independent experiments. Cytotoxicity was assessed using MTT assay. Briefly, MTT was added to the cells at a final concentration of 1.2 mM. The cells were incubated at 37° C. for 4 hours and then fixed with DMSO. Cytotoxicity was assessed by measuring absorbance at 540 nm as recommended by the manufacturer (Invitrogen, Thermo Fisher, Australia).

### Cytokine Production Assay.

[0608] 5×10⁴ of T84 cells were seeded in triplicate in 96 well plates and left to settle overnight. Raw or <3 kDa-filtered bacterial culture supernatant (25% v/v) or media control were added to T84 cells. After 90-minute treatment with the bacterial culture supernatants, the cells were stimulated with LPS (100 μg/ml). After 6 hours, T84 culture supernatant was collected for IL-6 assessment. IL-6 was measured using the HEK-blue cell reporter system from InvivoGen according to standard protocol. For the ELISA assays, 1×10⁴ cells/well of HCT116 cells were seeded in duplicate 96 well plates. HCT116 cells were treated with IL1P (10 ng) and indole-3-carbinol (5 μM) or culture supernatant (10% v/v) as appropriate and incubated at 37° C. for 16 hours. Then, cell supernatants were collected and analysed using an IL-8 human uncoated ELISA Kit according to the manufacturer's instructions.

### Cell Migration Assay.

[0609] The Transwell migration assay was used to assess the migration of HCT116 cells during exposure to C. sana MH35-1 and C. sana MH35-2 culture supernatant extracts. These bacterial extracts were prepared using an Amberlite XAD-7 resin essentially as previously described by Colosimo et al. Briefly, a single colony was inoculated and grown until early stationary phase. This “seed culture” broth was used to inoculate 600 mL of PYGM broth and the culture was incubated until early stationary phase. Culture supernatants were prepared by centrifuging the culture at 4000 g for 30 minutes and then passing the cell free supernatant through a 3 kDa filter according to the manufacturer's instructions (Sartorius Vivaflow® 50 Ultrafiltration Unit 3 kDa MWCO PES). Activated Amberlite XAD-7 resin was added to 400 mL of 3 kDa filtered cell-free supernatant (10% w/v), and the slurry was gently shaken overnight at 4° C. The resin was collected, washed with 400 mL of deionized water and then mixed with 120 mL of 100% methanol. Following 2 h incubation with gentle shaking, the methanol elution was collected. A second elution in 120 mL of 100% methanol was performed as previously described and the two elutions were ultimately combined and dried under vacuum using a rotary evaporator. The extract was fully resuspended at in 100% DMSO (thereafter referred to as 1000×) and stored at −20° C.

[0610] Human HCT116 gut epithelial cells were maintained in McCoys 5a medium supplemented with 10% FBS and 1% Pen/Strep. For the IncuCyte© scratch wound assay, 3.5×10⁴ HCT116 cells were seeded in 100 μL 10% FBS culture medium in the top compartment of a 6.5 mm insert with TC-treated polycarbonate membrane in 24-well plates (8 μm pore size, Corning Costar). 600 μL 10% FBS culture medium was added to the lower compartment. The cells were allowed to settle for 24 hours. After a DPBS wash, 100 μL and 600 μL of 0.5% FBS medium was added to the top and lower compartment, respectively. Then, 0.5× concentrated extract from C. sana MH35-1 and C. sana MH35-2 was added to the lower compartment. After 16 hours, the cells were washed with DPBS and the cells attached to the top of the membrane were carefully removed with a cotton tip. The migrated cells on the bottom of the membrane were then fixed in 70% ethanol for 10 minutes followed by staining in 0.25% crystal violet for 5 minutes. The Transwell inserts were washed with water, dried and the membrane mounted with 50% glycerol in water on glass slides and imaged immediately. Transwell experiments were performed in biological and technical triplicates and for each replicate two representative images of the membrane were taken at 10× magnification. The number of migrated cells was automatically counted using ImageJ and the average cell number displayed. The extent of cell migration was expressed as the average number of migrated cells in two microscopic fields per well from three biological and three technical replicates.

[0611] To assess migration with via the IncuCyte scratch wound assay, 3.5×10⁴ HCT116 cells were plated on poly-L-ornithine-coated Incucyte® ImageLock 96-well plates (Essen BioScience). After 24 hours, the Incucyte® WoundMaker tool was used to induce a homogeneous scratch wound in the nearly confluent cell monolayer. The cells were washed twice with DPBS and then 0.5× concentrated extract from C. sana MH35-1 and C. sana MH35-2 in 200 μL 0.5% FBS McCoys 5a medium was added. The cells were also treated with 0.5× concentrated extract from uninoculated bacterial media as a negative control. Immediately after adding the stimulants, the plate was transferred to the IncuCyte system and cell migration was monitored by imaging each well every 2 hours over the course of 72 hours. Data analysis was performed using the integrated analysis software.

### Example 3

Gemmiger Association with Health, IBD and Other Diseases.

[0612] Inflammatory bowel disease is characterised by structure-function changes to the microbiome with a significant reduction in both the prevalence and abundance of select gut bacteria in the IBD gut when compared to the healthy gut. Several studies have shown that these bacteria may modulate IBD pathogenesis (Mallone et al., 2011; and Sokol et al., 2008) however a key obstacle to using these bacteria to develop new therapeutics has been that low resolution 16S rRNA based profiling do not provide sufficient resolution to accurately discriminate against health and IBD associated strains at a low taxonomic level (i.e., genus, species, strain).

[0613] The inventors used the Microba Disease Database (MDD), which contains high resolution faecal gut metagenomic data and associated host metadata for 6,020 adults, to study the prevalence of Gemmiger species in inflammatory and autoimmune diseases. Metagenomic sequence reads were analysed using the Microba Community Profiler (MCP) (Parks et al., 2021).

[0614] Five Gemmiger species were detected in more than two individuals in the MDD: G. formicilis, the uncultured species G. sp003476825 and three uncultivated species that were discovered by Microba through the assembly of metagenomic reads into Metagenome Assembled Genomes (MAGs) (Parks et al., 2021) (G. species_A, G. species_B, and G. species_C).

[0615] The inventors found the Gemmiger species as being prevalent in healthy humans but rarely detected in inflammatory and autoimmune diseases (FIG. 14A-D). The strongest effect was observed for IBD, including both major subtypes ulcerative colitis and Crohn's disease (FIG. 14E, and Table 9, below). The genus Gemmiger was significantly less prevalent in IBD compared to healthy individuals (P=1.3e-10, FDR=1.9e-09). Accordingly, all 30 five Gemmiger species (G. formicilis, G. species_A, G. species_B, G. species_C and G. sp003476825) were significantly less prevalent in IBD as compared to healthy (FIG. 14E, Table 9). The strongest reduction in IBD was observed for G. formicilis (FIG. 14E, Table 9). These observations were validated in an independent IBD cohort previously published by Harvard ((Franzosa et al., 2018), FIG. 14F, Table 9).

TABLE 9
ASSOCIATION STATISTICS BETWEEN
GEMMIGER SPECIES AND IBD

| | PREVALENCE (%) | | | | P Cochran- |
|---|---|---|---|---|---|
| | Healthy | IBD | Healthy | IBD | Mantel- |
| Taxon | MDD | MDD | Harvard | Harvard | Haenszel test |
| Gemmiger formicilis | 83.8 | 38.5 | 71.7 | 18.0 | 6.2 × 10⁻³¹ |
| Gemmiger species_C | 44.0 | 12.3 | 39.1 | 2.3 | 2.3 × 10⁻¹⁶ |
| Gemmiger species_B | 10.9 | 5.7 | 10.9 | 3.9 | 0.036 |
| Gemmiger species_A | 73.1 | 45.1 | 41.3 | 10.9 | 4.1 × 10⁻¹² |
| Gemmiger | 90.8 | 68.9 | 80.4 | 39.1 | 1.2 × 10⁻¹³ |
| sp003476825 | | | | | |

### Isolation and Genome-Scale Analysis of G. Formicilis

[0616] To better understand the role of G. formicilis in health and the pathogenesis of IBD a new isolate, termed G. formicilis MH32-1 was isolated from a healthy human donor. The isolation was performed by generating a dilution-to-extinction enrichment and then plating for single colonies. G. formicilis MH32-1 was identified as an extremely oxygen sensitive strain that grew well on TY and PYG medium. It was typically observed as Gram-negative staining coccus-like cell with a characteristic “budding” morphology (Gossling & Moore 1975), FIG. 15A). A second isolate, G. formicilis MH32-2 was isolated from a faecal sample archived in the Microba Faecal Biobank. A faecal donor sample with G. formicilis at a relative abundance of 6.48% was serially diluted and plated on TY medium. Analysis by psMGS revealed a single plate with G. formicilis at a relative abundance of 1.35%. Individual colonies were subsequently picked and screened using custom G. formicilis primers. By this process an axenic isolate was subsequently produced. G. formicilis MH32-2 formed raised creamy white/milky colonies with an entire margin after 48 h on TY (FIG. 15B, top panel). Further analysis revealed that G. formicilis MH32-2 cells formed Gram-variable coccoid/ovoid cells that were often present as pairs or occasionally as short chains (FIG. 15B, bottom panel).

[0617] Phylogenetic reconstruction of the Gemmiger genus using high-quality GenBank and RefSeq genomes from the NCBI and MH32-1 revealed the isolate placed next to several uncultured members of G. formicilis, close to G. variabile, and several uncultured species (FIG. 15C, D). G. formicilis MH32-1 is a sugar fermenter, and is predicted to utilize starch, glucose, fructose, gluconate, lactose, trehalose, and lactaldehyde as a carbon source. Complete, or near complete biosynthetic pathways were identified for all amino acids except tryptophan, phenylalanine, serine, and tyrosine. Several pathways for the uptake and fermentation of amino acids (alanine, arginine, asparagine, cysteine, glutamic acid, glutamine, methionine, serine, and threonine) were also identified, but are likely not primary sources of energy. Metabolic modelling of the G. formicilis MH32-1 isolate revealed that when fed with glucose and other hexose sugars, the primary byproducts of fermentation are butyrate, acetate, ethanol, and fumarate. Pathways to produce lactate are also encoded by the G. formicilis MH32-1 isolate, but metabolic modelling did not predict these as major fermentation byproducts. The biosynthetic potential of G. formicilis MH32-1 was assessed by searching for well characterised, and putative biosynthetic gene clusters (BGCs) using AntiSmash v5.0 and deepBGC, respectively. AntiSmash identified a single RiPP sactipeptide BGC with no close homology to BGCs in public databases. DeepBGC identified the same sactipeptide RiPP and a further eight putative BGCs with >1 coding region and >0.75 deepBGC score, all annotated as antibacterial.

G. formicilis MH32-1 Enhances Gut Barrier Function

[0618] To assess the role of G. formicilis in the healthy gut, naive C57Bl/6 SPF mice were treated for 8 days with G. formicilis MH32-1 (FIG. 16A). During this treatment period, there was no morbidity, and no changes in general appearance, behaviour, posture, mobility and neurological behaviour were observed. Similarly, there was no significant change in body weight in G. formicilis MH32-1 treated animals relative to the vehicle control and colon length and weight/length ratio were also unaffected (FIGS. 16B-D). G. formicilis MH32-1 did not result in any significant histological changes in the colon when compared to the vehicle as determined by assessing epithelial injury and hypervascularization alone, or as a combined histopathological score (FIG. 16E-G).

[0619] It was hypothesised that the big-data approach described above could be used to identify novel candidate live biotherapeutics for inflammatory and autoimmune diseases (e.g., IBD). The inventors therefore tested the therapeutic efficacy of G. formicilis MH32-1 in an acute model of DSS induced murine colitis (FIG. 17A) as this is a well-documented model of epithelial injury and repair. DSS treatment resulted in significant disease activity relative to the vehicle control. There was a significant reduction in body weight (FIG. 17B) which has been shown to be an accurate and reliable indicator of colitis (Britto et al., 2019). As expected, prednisone exacerbated the DSS induced weight loss (Yamamoto et al., 2013), however DSS induced weight loss was ameliorated by treatment with G. formicilis MH32-1 or F. prausnitzii A2-165 (FIG. 17B). Endoscopic analysis revealed a progressive increase in disease activity in all treatment groups with F. prausnitzii A2-165 and G. formicilis but not prednisone resulting in lower disease activity at day 6 relative to the vehicle treatment group (FIG. 17C).

[0620] Analysis of the colon revealed significant shortening (FIG. 17D) following DSS treatment. Treatment with F. prausnitzii A2-165 and G. formicilis MH32-1 but not prednisone resulted in a significant reduction in colon shortening (FIG. 17D). Histological analysis of DSS treated mice revealed significant gut damage characterised by crypt loss and epithelial erosion. Notably, treatment with G. formicilis MH32-1 resulted in significant improvement in pathology characterised by crypt re-formation and re-epithelisation (FIG. 17E) as evidenced by improvements in histopathological healing (FIG. 17F) and epithelial injury (FIG. 17G). Consistent with this, treatment with G. formicilis MH32-1 resulted in decreased gut inflammation as determined by lipocalin-2 in faeces (FIG. 17H (McSweeney et al., 2005)). As expected, prednisone and F. prausnitzii A2-165 also resulted in a significant improvement in disease pathology.

[0621] The IL-23-Th17 cell immune axis is central to the pathogenesis of IBD and is a validated therapeutic target (Martin, et al., 2017). As the DSS model of gut barrier function is largely underpinned by Th1 polarised immunity (Marks et al., 2015) the therapeutic efficacy of G. formicilis MH32-1 in the murine SKG model was also tested. SKG mice carry a mutation in the ZAP-70 gene and develop IL-23 driven Crohn's-like ileitis and autoimmune inflammatory arthritis following disease initiation with curdlan treatment (FIG. 17I, (Liu et al., 2019)). Histological analysis of vehicle treated mice revealed significant gut damage characterised by infiltration of inflammatory cells and granuloma formation 7 days after curdlan treatment. As expected, treatment with the anti-IL-23 monoclonal antibody resulted in a significant reduction in histological damage. Treatment with G. formicilis MH321 also resulted in significant improvement in pathology as evidenced by improvements in the histopathological score (FIG. 17J).

[0622] Taken together, these data revealed that G. formicilis MH32-1 did not cause any adverse effects in DSS treated or naïve mice, and that G. formicilis MH32-1 enhanced gut barrier function and promoted mucosal healing in DSS treated and SKG mice.

G. formicilis Suppresses STAT3 Activation In Vitro

[0623] Given the dramatic effects on histological inflammation and re-epithelialisation observed in the DSS treated animals, the inventors next examined the ability of G. formicilis to modulate IBD associated immune pathways. IL-23 driven immune responses are central to the pathogenesis of IBD and are a clinically recognised target (Friedrich et al., 2019; Yang et al., 2017). The inventors examined the ability of G. formicilis MH32-1 to suppress IL-23-mediated activation of STAT3 using the HEK-Blue™ IL-23 reporter cell line. The HEK-Blue™ IL-23 reporter cell line carries a STAT3 inducible SEAP reporter that is responsive to IL-23 stimulation. As expected, IL-23 mediated activation of STAT3 could be prevented by tofacitinib (FIG. 18A). Interestingly, cell free culture supernatant prepared from G. formicilis MH32-1 grown in TY medium suppressed SEAP reporter activity (FIG. 18A). Further analysis revealed the STAT3 suppressive activity of G. formicilis was associated with the <3 kDa fraction (FIG. 18A). Notably, we did not observe any cytotoxic effects following treatment with G. formicilis culture supernatants. The biochemical characteristics of the CS were assessed by heat and proteinase K treatment. By this approach, it was determined that the STAT3 suppressive activity of G. formicilis was unaffected by heat or proteinase K (FIG. 18B-C).

[0624] Finally, the inventors examined the impact of growth medium dependent effects on IL-23 mediated STAT3 activation. CS prepared from strains grown in TY or PYG medium exhibited potent STAT3 suppressive activities. Interestingly, there was minimal STAT3 suppressive activity when the strains were grown in Wilkins-Chalgren medium and MCM medium (FIG. 18D). This is consistent with previous reports (e.g., Giri et al., 2019; Schreiner et al., 2019) and suggests that the immunomodulatory activity G. formicilis MH321 can be enhanced by nutritional factors.

[0625] In order to demonstrate that the IL-23 suppressive activity was characteristic of G. formicilis as a species, two additional G. formicilis strains were analysed. The ability of G. formicilis MH32-2 culture supernatant to suppress IL-23 mediated activation of STAT3 was assessed using the HEK Blue IL-23 reporter cell line. The HEK Blue IL-23 cell line contains a STAT3 responsive SEAP reporter whose expression is induced by IL-23. Treatment with tofacitinib, a pan JAK inhibitor, inhibits IL-23 mediated SEAP expression. Treatment with TY medium resulted in modest suppression of IL-23 mediated activation of STAT3 (FIG. 18E). The present inventors also interrogated the ability of culture supernatant and <3 kDa supernatant fraction to modulate STAT3 activity. The <3 kDa fraction as was analysed to determine whether the STAT3 activity was due to a low molecular weight bioactive, which would be more amenable to drug development. G. formicilis MH32-2 culture supernatant suppressed IL-23 mediated STAT3 activation (FIG. 18E). Notably, the G. formicilis MH32-2<3 kDa fractions suppressed IL-23 mediated STAT3 activation to a similar extent as the cell free culture supernatant (FIG. 18E). The <3 kDa culture supernatant fraction of MH32-1 was also able to significantly suppress IL-6-induced STAT3 activation in HEK reporter cells (p=0.0009) (FIG. 18J). During both experiments, no cytotoxicity effects of the supernatants were detected.

[0626] In addition, the G. formicilis type stain (ATCC 27749) suppressed IL-23 mediated STAT3 activation, providing further evidence that this activity was representative of the G. formicilis species. The suppressive activity was detected in the supernatant fraction suggesting that it was mediated by a secreted bioactive (FIG. 18F). Furthermore, the bioactive(s) are likely low molecular weight as the suppressive activity was detected in the <3 kDa fraction.

[0627] Next, the present inventors examined the ability of Gemmiger sp. MD158 culture supernatant to suppress IL-23 mediated activation of STAT3 using the HEK Blue IL-23 reporter cell line. Treatment with tofacitinib inhibited IL-23 mediated SEAP expression. Treatment with TY medium resulted in modest suppression of IL-23 mediated activation of STAT3 (FIG. 18G). We examine the ability of culture supernatant and <3 kDa supernatant fraction to modulate STAT3 activity. The present inventors examined the <3 kDa fraction as we believed low molecular weight bioactives would be more amenable to drug development. Gemmiger sp. MD158 culture supernatant suppressed IL-23 mediated STAT3 activation (FIG. 18G). Notably, the G. Gemmiger sp. MD158<3 kDa fractions suppressed IL-23 mediated STAT3 activation to a similar extent as the cell free culture supernatant (FIG. 18G). During the experiment, no cytotoxicity effects of the supernatants were detected.

[0628] Given the immunomodulatory capacity of the culture supernatant, the inventors realised that the bioactives produced by G. formicilis may have direct effects on peripheral immune cells (PBMCs). We therefore examined the effect of G. formicilis MH32-1 culture supernatant on IL-6 production as increased levels of the pro-inflammatory cytokine IL-6 and signalling via its receptor IL-6R is associated with IBD pathogenesis. Notably, IL-6 contributes to chronic inflammation in the gut due to its pro-inflammatory and anti-apoptotic effects on immune cells. These effects are mediated by IL-6 receptor binding which causes JAK kinase activation and STAT3 dimerization in combination with activation of MAPK/ERK and other downstream kinases. Treatment of PBMCs with PIM induced IL-6 production and this induction was unaffected by pre-treatment with TY medium (FIG. 18H). Pre-treatment with G. formicilis MH32-1 culture supernatant suppressed PIM stimulated IL-6 secretion relative to the TY pre-treated control (FIG. 18H). Pre-treatment of T84 gut epithelial cells with G. formicilis MH32-1 culture supernatant or the <3 kDa culture supernatant fraction suppressed LPS mediated IL-6 secretion (FIG. 18I). Taken together, these data shows that G. formicilis can modulate an important cytokine with a key role in innate and adaptive immune cell driven responses.

G. formicilis Promotes Human Intestinal Epithelial Cell Migration.

[0629] Damage of the intestinal barrier commonly occurs in IBD. The rapid migration of intestinal epithelial cells is a crucial component of the wound healing process to re-establish homeostasis. To investigate whether bioactives derived from G. formicilis can affect the motility of intestinal epithelial cells, a TRANSWELL® migration assay was employed. HCT116 cells were seeded apically in a TRANSWELL® chamber and the ability of G. formicilis extract to promote migration to the basolateral side of the chamber was assessed. Untreated cells had a basal level of migration to the basolateral side of the membrane, and this was unaffected by treatment with TY medium (FIG. 19A-B). G. formicilis MH32-1 significantly promoted the migration of HCT116 cells to the basolateral side (FIG. 19A-B). The pro-migratory effects of G. formicilis were further confirmed using the IncuCyte scratch wound assay. At 18 hours post induction of a scratch wound, HCT116 cells showed an accelerated rate of wound closure in the presence of extract from G. formicilis MH32-1, compared to the control cells treated with TY medium (FIG. 19C-D).

### G. Formicilis Supports Effective Gut Barrier Function

[0630] Intestinal epithelial cells form a physical and biochemical barrier that separates host tissue from gut microbes and luminal contents (Peterson et al., 2014). Impaired gut barrier function has been implicated in the pathogenesis of inflammatory and autoimmune diseases, including IBD (Vanuytsel et al., 2021) and has been proposed as a therapeutic target to improve disease outcome (Sommer et al., 2021).

[0631] The present inventors assessed the integrity of the gut epithelial cell barrier using a non-invasive method termed trans-epithelial electrical resistance (TEER). In this assay, an electrical current is applied across an epithelial cell layer and the resistance is recorded. A reduction in the TEER value is indicative of a compromised barrier. TEER measurements constitute the “gold standard” for non-invasive measurements of barrier integrity in mono-culture cell layers.

[0632] The ability of G. formicilis to modulate barrier function using T84 epithelial cells was determined. In this model, IFN-γ is known to negatively affect barrier function and was therefore utilised to simulate a diseased state. IFN-γ exposure resulted in a significant drop in recorded TEER values, indicative of a reduced barrier integrity. Treatment with <3 kDa fractionated culture supernatant from G. formicilis MH32-1 significantly mitigated the IFN-γ-mediated reduction in TEER relative to the YG/V medium control (FIG. 20A) and thus, G. formicilis may promote the restoration of barrier integrity.

### Materials & Methods

### Bacterial Strains, Culture Conditions and Analyses.

[0633] Stool samples were collected from healthy human adults with no history of gastrointestinal disorders and mixed with an equal weight per volume of sterile oxygen free glycerol solution (McSweeney, 2005). Donors had not consumed antibiotics in the three months prior to collection of the faecal samples. G. formicilis and Faecalibacterium prausnitzii were routinely processed in a Coy vinyl anaerobic chamber with an oxygen free atmosphere (85% N₂: 10% CO₂: 5% H₂) atmosphere. G. formicilis was routinely cultured in TY or PYG medium while F. prausnitzii was cultured in TY medium. All isolates were stocked by mixing 3 mL of actively growing culture with an equal volume of glycerol solution (McSweeney, 2005) and storing at −80° C.

Isolation of G. formicilis MH32-1.

[0634] An isolate of G. formicilis was produced by inoculating a donor faecal sample with G. formicilis present at a relative abundance of 2.48% into TY medium and then serially diluting to extinction. Colonies were recovered on TY medium and then screened essentially as previously described to identify extremely oxygen sensitive isolates. Here, individual colonies were replica plate over 2 TY agar plates in an anaerobic chamber. One plate was subsequently removed from the anaerobic chamber and exposed to atmospheric conditions for 1 hour. The plate was then returned to the anaerobic chamber and both plates were incubated at 37° C. Extremely oxygen sensitive isolates were identified by their failure to grow following 1 hour exposure to atmospheric conditions. A single isolate was purified by streaking on TY agar and G. formicilis MH32-1 was identified by whole genome sequencing.

Isolation of G. formicilis MH32-2.

[0635] Donor faecal sample BBD6936 with G. formicilis present at a relative abundance of 6.48% (see Experimental Data/Faecal Biobank data) was serially diluted and plated on TY medium. Following 5 days growth, the plates were examined and plates with >50 colonies were divided into 6 equal parts. The culturable microbial diversity on each plate was assessed by plate scrape metagenomic sequencing (psMGS). Briefly, the colonies in at least two parts were independently scraped off the plate into sterile anaerobic diluent and DNA was extracted and submitted for metagenomic sequencing. The sequence data was analysed using the Microba Analysis Pipeline and the diversity in each section was assessed. Single colonies were subsequently arrayed onto TY agar and incubated at 37° C. until grown. DNA was extracted from individual patches and analysed by qPCR using custom G. formicilis targeting primers (forward primer Pf 5′-CGCGCAGTCGAACGCAATGTTCGTGAC C-3′; reverse primer Pᵣ 5′-GGCACAGCGCACTGGAGATGAAGCGC-3′). By this approach, a single candidate G. formicilis isolate was identified and streaked onto TY agar. A single colony was picked and streaked on TY agar and this process was repeated once more. The identity and purity of the final isolate was assessed by whole genome sequencing and microscopy. The axenic isolate was determined to be Gram-variable staining coccoid isolate with a characteristic dumbbell morphology and was termed G. formicilis MH32-2 following whole genome sequencing.

[0636] G. formicilis MH32-2 was examined by microscopy using standard protocols in the art. Briefly, a broth culture (usually 0.2 mL) was centrifuged, and the cell pellet was resuspended in 3-6 μL of PBS. The cell pellet was transferred onto a glass slide and smeared with a 1 μL loop, whereafter it was air-dried, or heat fixed. The dried/heat-fixed smear was flooded with crystal violet staining reagent for 30 seconds and the slide was then washed in an indirect stream of tap water to remove unbound stain. The slide was next flooded with Gram's iodine for 30 seconds and the slide was again washed in an indirect stream of tap water to remove unbound stain. The slide was next flooded with decolorizing agent and then immediately washed with tap water. Finally, the slide was flooded with safranin for 30 seconds and the slide was then washed in an indirect stream of tap water until the water ran clean. The slide was allowed to air dry, and cells were then visualised under an oil immersion using a Brightfield microscope.

Isolation of Gemmiger sp. MD158

[0637] To isolate Gemmiger sp. MD158, 1 mL of a faecal stock sample was mixed with a further 3 mL of 30% glycerol solution and vortexed for 2 minutes with ˜3.5 mm glass beads (Daintree Scientific) to dissociate bacteria from faecal debris. Aliquots of the dissociated bacteria were stored at −80° C. for later processing as necessary. Bacterial cells were sorted using a BD FACSAria™ Fusion Flow Cytometer with a 100 μm nozzle and small particle detector according to the manufacturer's instruction. The system was pressurised at 20 psi and events were triggered on scatter with thresholds set using 0.2 μm filtered PBS which allowed a few events from the noise floor. To sort bacterial cells, an aliquot was filtered through a 40 μm filter and a 10⁻³ dilution of the filtrate was subsequently prepared using a 0.2 μm filtered anaerobic buffered diluent solution (i.e., 38 ml/L each of salt solutions 2 & 3 (McSweeney et al., 2005). The diluted filtrate was run to determine the dilution resulting in 500-1200 events per second. Targets were gated on scatter and doublets were excluded (gating strategy shown in FIG. 20B). Single cells were deposited onto a TY agar plate and incubated at 37° C. for up to 3 weeks. Isolates were identified by whole genome sequencing following growth in TY broth. By this approach, an isolate affiliated with Gemmiger sp. was tentatively identified. The final purified isolate was glycerol stocked and submitted for whole genome sequencing and by this approach an isolate termed Gemmiger sp. MD158 was produced.

### Metabolic Reconstruction.

[0638] Protein coding sequences were predicted and annotated using the annotate function in enrichM (version 0.5.2). Briefly, enrichM identifies protein coding sequences using prodigal (version 2.6.3) in -p meta mode. The amino acid sequences are then searched against the UniRef100 database (downloaded November 2020) using DIAMOND (version 2.0.4), and E.C., TCDB and eggnog classifications are inherited from the idmapping file distributed with UniRef. Hmmer hmmsearches (version 3.1b2) against Pfam (release 33.0), tigrfam (release 15.0) and dbcan2 (downloaded September 2019) were used to annotate functional domains, key metabolic markers and carbohydrate activate (CAZy) enymes, respectively. Metabolic pathways were identified using the classify function in enrichM, which assesses annotations and their genomic position against manually defined metabolic pathway definitions. A pathway is considered present in a genome if it encoded >80% of the required proteins, and passes all required synteny checks. These automatically predicted pathways were then manually assessed. In addition, gutSMASH (version 1.0.0) was applied to identify common biosynthetic pathways encoded by gut microorganisms.

### Phylogenetic Tree

[0639] A genome tree was constructed from high quality genomes, defined as ≥90% complete and ≤5% contamination from checkM analysis, within the Gemmiger genus (NCBI release 89) and the four MH32 isolates. For each genome, a set of 122 bacteria-specific conserved marker genes were extracted from each genome using gtdbtk identify. These genes were the aligned to profile HMMs and concatenated to a single alignment with gtdbtk align, and a Maximum likelihood phylogenetic tree was constructed from the alignments using FastTree (version 2.1.10) with gtdbtk infer. Non-parametric bootstrap values were inferred using GenomeTreetk (v0.1.6) from 1000 repetitions.

### Preparation of Bacterial Strains for Animal Experimentation.

[0640] G. formicilis and F. prausnitzii strains were grown to early stationary phase in TY medium. The cell density of the individual cultures was calculated using a Helber Counting Chamber. To prepare the bacterial gavage solutions, individual cultures were centrifuged under a layer of sterile heavy mineral oil at 5,000 g for 10 minutes and the cell-free supernatant was then discarded. The cell pellets were washed in 1.5 mL of sterile anaerobic buffered diluent (38 mL/L each of salt solutions 2 & 3 (McSweeney et al., 2005), 1 mL/L of 0.1% (w/v) resazurin solution, 1 g/L L-cysteine) and then centrifuged again. Finally, the washed cell pellet was resuspended in half strength glycerol solution (15% v/v glycerol solution in anoxic buffered diluent) to a final concentration of 1×10⁹ cells/mL, aliquoted and frozen at −80° C. until required. The viability of the cell preparations was confirmed by thawing a single aliquot and streaking on an agar plate. The identity and purity of the individual strain preparations was confirmed by whole genome sequencing.

### Acute Model of DSS-Induced Gut Barrier Dysfunction.

[0641] Six-week-old C57BL/6 female mice purchased from Animal Resources Centres (Western Australia, Australia) were randomised and then co-housed for seven days prior to experimentation. To induce gut barrier dysfunction, mice were treated with 3% DSS ad libiteum in the drinking water for six days. Naïve age matched control mice were processed and received DSS free drinking water. All treatments started one day prior to provision of DSS and all mice were sacrificed two days after the final DSS treatment. For the treatments, mice were anesthetised with isofluorane and orally gavaged with 200 μl of bacterial preparations or vehicle control. Prednisone (2 mg/kg) was administered following anesthetisation by intraperitoneal injection. Body weights and stool consistency were recorded daily. Stool samples were collected daily. Following sacrifice, the colon, liver and spleen were collected for analysis. Blood was collected by cardiac puncture.

### Endoscopic and Histological Scoring.

[0642] Animals were examined with a small animal gastrointestinal endoscope (Karl Storz Endoskope, Tuttlingen, Germany) on days 1, 2 and 6 to assess the extent of colon mucosal inflammation (Marks et al., 2015; and Liu et al., 2019). Briefly, mice were anesthetised with isoflurane and a colonoscope was inserted through the rectum. Images captured by high-definition videos were examined in a blinded manner to assess the presence and extent of disease pathologies (Table 5). Histological scoring was performed essentially as previously described in the art (Marks et al., 2015). Briefly, samples were fixed in 4% formalin, paraffin embedded and sectioned. Tissue sections were hematoxylin and eosin stained to assess disease pathology and with Alcian blue to assess mucin production. Slides were imaged using the Aperio digital imaging system (Leica Biosystems, NuBloch, Germany). To grade colitis severity, the extent of inflammation and epithelial injury in the tissue sections were graded semi-quantitatively using an established scoring system (Table 6). The samples were then randomised and subsequently scored in a blinded by a trained gastrointestinal pathologist.

### Characterisation of STAT3 Suppressive Activity.

[0643] To assess STAT3 suppressive activity of the G. formicilis strains, three independent colonies were inoculated and grown until early stationary phase. Then, each seed culture broth was used to inoculate two technical replicates each generating six technical replicates from three biological replicates. The technical replicates were grown until early stationary phase and then cell free culture supernatant was harvested as previously described (Giri et al., 2019). Culture supernatants were size fractionated by passing through a 3 kDa CENTRICON® column according to the manufacturer's (Merck Millipore) instructions. To prepare Gemmiger sp. MD158 supernatant samples for assay, a seed culture was established and grown until early stationary phase. Then, the seed culture broth was used to inoculate two technical replicates. The technical replicates were grown until early stationary phase and then cell free culture supernatant was harvested as previously described (Giri et al., 2019). Culture supernatants were size fractionated by passing through a 3 kDa CENTRICON® column according to the manufacturer's (Merck Millipore) instructions.

[0644] STAT3 activity was assessed using the HEK Blue IL-23 cell line (Invivogen). Briefly, 50,000 cells per well were seeded in triplicate in a 96-well plate 24 hours prior to the start of the assay. Bacteria supernatant or sterile bacterial medium were mixed at a final concentration of 10%, 25%, or 50% v/v with recombinant human IL23 (rhIL-23, R&D systems) at a final concentration of 5 ng/mL. This mixture was then added directly to the cells and incubated at 37° C. for 6 hours. The ability of the supernatants to suppress STAT3 activation was compared to the Janus kinase inhibitor tofacitinib (10 μM). STAT3 regulated SEAP reporter activity was assessed using Quanti Blue solution as recommended by the manufacturer (Invivogen). Results are the average of at least three independent experiments. Cytotoxicity was assessed using MTT assay. Briefly, MTT was added to the cells at a final concentration of 1.2 mM. The cells were incubated at 37° C. for 4 hours and then fixed with DMSO. Cytotoxicity was assessed by measuring absorbance at 540 nm as recommended by the manufacturer (Invitrogen, Thermo Fisher, Australia).

### Cytokine Production Assay.

[0645] 5×10⁴ of T84 cells were seeded in triplicate in 96 well plates and left to settle overnight. Raw or <3 kDa-filtered bacterial culture supernatant (25% v/v) or media control were added to T84 cells. After 90-minute treatment with the bacterial culture supernatants, the cells were stimulated with LPS (100 μg/ml). After 6 hours, T84 culture supernatant was collected for IL-6 assessment. IL-6 was measured using the HEK-blue cell reporter system from InvivoGen according to standard protocol.

[0646] PBMCs were extracted as previously described (Mallone et al., 2011). Briefly, PBMCs were isolated from blood samples using a Ficoll/Lymphoprep gradient (Stemcell), frozen at 80° C., and stored in liquid nitrogen. For the experiments, 250,000 PBMCs/well were seeded in 24-well plates. PBMCs were stimulated with PMA/Ionomycin/Monensin (40 ng/mL, 1 mg/mL, and 2 mg/mL respectively) for 4 hours at 37° C. An untreated control was used as negative control. Where indicated, PBMCs were pre-treated for 30 minutes at 37° C. with bacterial supernatant or bacterial medium control at final concentration of 10% v/v. To characterise the IL-6 present in PBMC culture supernatants, cell culture media supernatants from PBMCs that were stimulated as described above were collected and stored at −80° C. These supernatants were subsequently thawed and used to determine effects on cytokine production.

### Cell Migration Assay.

[0647] The IncuCyte® Live-Cell Imaging System (Essen BioScience) and Transwell migration assay were used to assess the migration of HCT116 cells during exposure to sterile culture supernatant from G. formicilis. Human HCT116 gut epithelial cells were maintained in McCoys 5a medium supplemented with 10% FBS and 1% Pen/Strep. For the IncuCyte® scratch wound assay, 3.5×10⁴ HCT116 cells were plated on poly-L-ornithine-coated IncuCyte® ImageLock 96-well plates (Essen BioScience). After 24 hours, the IncuCyte® WoundMaker tool was used to induce a homogeneous scratch wound in the nearly confluent cell monolayer. The cells were washed twice with DPBS and then stationary phase culture supernatant from G. formicilis at 1% (v/v) in 200 μL 0.5% FBS McCoys 5a medium was added. Uninoculated bacterial media (1%) served as negative control. Immediately after adding the stimulants, the plate was transferred to the IncuCyte® system and cell migration was monitored by imaging each well every 2 hours over the course of 72 hours. Data analysis was performed using the integrated analysis software.

[0648] To assess cell migration via the TRANSWELL® assay, 3.5×10⁴ HCT116 cells were seeded in 100 μL 10% FBS culture medium in the top compartment of a 6.5 mm insert with TC-treated polycarbonate membrane in 24-well plates (8 μm pore size, Corning Costar). 600 μL 10% FBS culture medium was added to the lower compartment. The cells were allowed to settle for 24 hours. After a DPBS wash, 100 μL and 600 μL of 0.5% FBS medium was added to the top and lower compartment, respectively. Then, 0.4× concentrated extract from G. formicilis was added to the lower compartment. These bacterial extracts were prepared using an Amberlite XAD-7 resin as previously described. After 16 hours, the cells were washed with DPBS and the cells attached to the top of the membrane were carefully removed with a cotton tip. The migrated cells on the bottom of the membrane were then fixed in 70% ethanol for 10 minutes followed by staining in 0.25% crystal violet for 5 minutes. The TRANSWELL® inserts were washed with water, dried and the membrane mounted with 50% glycerol in water on glass slides and imaged immediately. TRANSWELL® experiments were performed in biological and technical triplicates and for each replicate two representative images of the membrane were taken at 10× magnification. The number of migrated cells was automatically counted using ImageJ and the average cell number displayed. The extent of cell migration was expressed as the average number of migrated cells in two microscopic fields per well from three biological and three technical replicates. Epithelial barrier integrity assay using Trans-Epithelial Electrical Resistance (TEER).

[0649] The ability of G. formicilis to prevent loss of barrier integrity was assessed by measuring the transepithelial electrical resistance across confluent monolayers of T84 gut epithelial cells using the Maestro Pro system. T84 cells were purchased from CellBank Australia and cultured in Dulbecco's Modified Eagle Medium Nutrient Mixture 12 (DMEM/F12; ThermoFisher Scientific, Waltham, MA, USA) supplemented with 5% foetal bovine serum and 1% Penicillin-Streptomycin. T84 cells were seeded at a density of 0.1×10⁶ cells in a total of 0.2 mL/well into 96-well CytoView-Z plates and incubated at 37° C., 5% C02 in the Maestro Pro system (Axion BioSystems, Atlanta, GA, USA). To maintain consistent humidity, sterile water was added to compartments surrounding the wells. Once stabile TEER measurements were established (approximately 100 h post-seeding), cells were stimulated with recombinant human IFN-γ (100 ng/mL; R&D systems, Minneapolis, MN, USA). At 72 h post-stimulation, cells were washed with dPBS (ThermoFisher Scientific, Waltham, MA, USA) and media replaced with DMEM/F12 only, or DMEM/F12 supplemented with 1×YG/V media control or 1×G. formicilis bacterial extract prepared using Amberlite XAD-7 resin as previously outlined. At 45 h post-treatment, TEER measurements were recorded, and the percentage difference in TEER value compared to the control (untreated T84 cells) was visualised in histograms as mean f SD. Statistical significance was determined by unpaired t-test.

[0650] The disclosure of every patent, patent application, and publication cited herein is hereby incorporated herein by reference in its entirety.

[0651] The citation of any reference herein should not be construed as an admission that such reference is available as “Prior Art” to the instant application.

[0652] Throughout the specification the aim has been to describe the preferred embodiments of the invention without limiting the invention to any one embodiment or specific collection of features. Those of skill in the art will therefore appreciate that, in light of the instant disclosure, various modifications and changes can be made in the particular embodiments exemplified without departing from the scope of the present invention. All such modifications and changes are intended to be included within the scope of the appended claims.

### REFERENCES

[0653] Albert E, Walker J, Thiesen A, Churchill T, Madsen K (2010) cis-Urocanic Acid Attenuates Acute Dextran Sodium Sulphate-Induced Intestinal Inflammation. PLoS ONE 5(10): e13676.
[0654] Arumugam, M. et al., Enterotypes of the human gut microbiome. Nature 473 (7346): 174-180 (2011).
[0655] Atlas, R., Handbook of Microbiological Media, Fourth Edition (2010) CRC Press.
[0656] Azad et al., Probiotic supplementation during pregnancy or infancy for the prevention of asthma and wheeze: systematic review and meta-analysis. BMJ. (2013) 347:f6471.
[0657] Balato et al., (2014) J. Eur. Acad. Dermatol. Venereol. 28(8): 1016-24.
[0658] Barreiro-de Acosta, M., Vallejo, N., de la Iglesia, D., et al. Evaluation of the risk of relapse in ulcerative colitis according to the degree of mucosal healing (Mayo 0 vs 1): a longitudinal cohort study. J. Crohns Colitis. 2016; 10: 13-9.
[0659] Benham H, Rehaume L M, Hasnain S Z, Velasco J, Baillet A C, Ruutu M, et al. Interleukin-23 Mediates the Intestinal Response to Microbial β-1,3-Glucan and the Development of Spondyloarthritis Pathology in SKG Mice. Arthritis & Rheumatology. 2014; 66(7):1755-67.
[0660] Brestoff J. R. and Atris D., Commensal bacteria at the interface of host metabolism and the immune system. Nat. Immunol., 14: 676-684 (2013).
[0661] Britto S L, Krishna M, Kellermayer R. Weight loss is a sufficient and economical single outcome measure of murine dextran sulfate sodium colitis. FASEB bioAdvances. 2019; 1(8): 493-7.
[0662] Brosiu et al., Complete nucleotide sequence of a 16S ribosomal RNA gene from Escherichia coli, Proc. Nat. Acad. Sci, 75(10): 4801-4805 (1978).
[0663] Chan, W., Chen, A., Tiao, D., Selinger, C. & Leong, R. Medication adherence in inflammatory bowel disease. Intest. Res. 15, 434 (2017).
[0664] Chassaing B, Srinivasan G, Delgado M A, Young A N, Gewirtz A T, Vijay-Kumar M. Fecal lipocalin 2, a sensitive and broadly dynamic non-invasive biomarker for intestinal inflammation. PLoS One. 2012; 7(9):e44328.
[0665] Chaumeil, P. A., Mussig, A. J., Hugenholtz, P., and Parks, D. H., GTDB-Tk: A Toolkit to Classify Genomes with the Genome Taxonomy Database. (2020) Bioinformatics 36 (6): 1925-27.
[0666] Cheluvappa et al., (2014) Clin. Exp. Immunol. 175(2): 316-22.
[0667] Colosimo D A, Kohn J A, Luo P M, Piscotta F J, Han S M, Pickard A J, et al. Mapping interactions of microbial metabolites with human G-protein-coupled receptors. Cell Host & Microbe. 2019; 26(2): 273-82.e7.
[0668] D′Haens, G, Sandborn, WJ, Feagan, B G, et al. A review of activity indices and efficacy end points for clinical trials of medical therapy in adults with ulcerative colitis. Gastroenterology. 2007; 132: 763-86.
[0669] Fabro et al., (2015) Immunobiology, 220(1): 124-35.
[0670] Friedrich M, Pohin M, Powrie F. Cytokine Networks in the Pathophysiology of Inflammatory Bowel Disease. Immunity. 2019; 50(4):992-1006.
[0671] GBD 2017 Inflammatory Bowel Disease Collaborators, The global, regional, and national burden of inflammatory bowel disease in 195 countries and territories, 1990-2017: a systematic analysis for the Global Burden of Disease Study 2017; Lancet, 5(1): 17-30.
[0672] Geva-Zatorsky, N. et al. Mining the human gut microbiota for immunomodulatory organisms. Cell 168, 928-943 (2017).
[0673] Giri R, Hoedt E C, Shamsunnahar K, McGuckin M A, Morrison M, Capon R J, et al. Secreted microbial metabolites modulate gut immunity and inflammatory tone. bioRxiv. 2019:2019.12.16.861872.
[0674] Goldin B. R., Gorbach S. L. Clinical indications for probiotics: an overview. Clin Infect Dis. (2008) 46 Suppl 2: S96-100.
[0675] Grosheva I, Zheng D, Levy M, Polansky O, Lichtenstein A, Golani O, et al. High-Throughput Screen Identifies Host and Microbiota Regulators of Intestinal Barrier Function. Gastroenterology. 2020; 159(5):1807-23.
[0676] Handbook of Pharmaceutical Excipients, 2nd Edition, (1994), Edited by A Wade and PJ Weller.
[0677] Hunter-Cevera, J. C., Maintaining Cultures for Biotechnology and Industry (1996) Academic Press.
[0678] Kabat, A. M., Srinivasan, N. & Maloy, K. J. Modulation of immune development and function by intestinal microbiota. Trends Immunol. 35, 507-517 (2014).
[0679] Kailasapathy et al. (2002) Curr. Issues Intest. Microbiol. 3(2):39-48.
[0680] Karagozian, R. & Burakoff, R. The role of mesalamine in the treatment of ulcerative colitis. Ther. Clin. Risk Manag. 3, 893 (2007).
[0681] Kim et al., Alistipes butyricigenes sp. nov., a butyrate-producing bacterium isolated from human faeces, J. Microbio. 57(1): 38-44; (2019).
[0682] Kunsch C, Rosen C A. NF-kappa B subunit-specific regulation of the interleukin-8 promoter. Mol Cell Biol. 1993; 13(10): 6137-46
[0683] Li, X., Atkinson, M. A. The role for gut permeability in the pathogenesis of type 1 diabetes—a solid or leaky concept? Pediatr. Diabetes 16, 485-492 (2015).
[0684] Liu G, Mateer S W, Hsu A, Goggins B J, Tay H, Mathe A, et al. Platelet activating factor receptor regulates colitis-induced pulmonary inflammation through the NLRP3 inflammasome. Mucosal Immunol. 2019; 12(4): 862-73.
[0685] Lloyd-Price J, Arze C, Ananthakrishnan A N, Schirmer M, Avila-Pacheco J, Poon T W, et al. Multi-omics of the gut microbial ecosystem in inflammatory bowel diseases. Nature. 2019; 569(7758): 655-62.
[0686] Mallone R., Mannering S. I., Brooks-Worrell B. M., Durinovic-Belló I., Cilio C. M., Wong F. S., et al. Isolation and preservation of peripheral blood mononuclear cells for analysis of islet antigen-reactive T cell responses: position statement of the T-Cell Workshop Committee of the Immunology of Diabetes Society. Clin Exp Immunol. 2011; 163(1): 33-49.
[0687] Manimozhiyan, A., et al., Enterotypes of the human gut microbiome. Nature 473 (7346): 174-180 (2011). Marks E, Goggins B J, Cardona J, Cole S, Minahan K, Mateer S, et al. Oral delivery of prolyl hydroxylase inhibitor: AKB-4924 promotes localized mucosal healing in a mouse model of colitis. Inflamm Bowel Dis. 2015; 21(2): 267-75.
[0688] Masco, L. et al., Identification of Bifidobacterium species using rep-PCR fingerprinting, Systematic and Applied Microbiology, 26(4):557-563 (2003).
[0689] McSweeney C. S., Denman S. E., Mackie R. I., Rumen bacteria. In: Makkar HPS; Methods in gut microbial ecology for ruminants. 23-37 (2005).
[0690] Meddings, J. B., Jarand, J., Urbanski, S. J., Hardin, J., Gall, D. G. Increased gastrointestinal permeability is an early lesion in the spontaneously diabetic BB rat. Am. J. Physiol. 276, G951-G957 (1999).
[0691] Mitropoulou et al. (2013) J. Nutr. Metab. (2013) 716861.
[0692] Nuzzo A, Saha S, Berg E, Jayawickreme C, Tocker J, Brown J R. Expanding the drug discovery space with predicted metabolite-target interactions. Communications Biology. 2021; 4(1):288.
[0693] Remington's Pharmaceutical Sciences, Mack Publishing Co. (A. R. Gennaro edit. 1985).
[0694] Masnadi Shirazi K, Sotoudeh S, Masnadi Shirazi A, Moaddab S-Y, Nourpanah Z, Nikniaz Z. Effect of N-acetylcysteine on remission maintenance in patients with ulcerative colitis: A randomized, double-blind controlled clinical trial. Clinics and Research in Hepatology and Gastroenterology. 2021; 45(4):101532.
[0695] Monteleone et al., (2011) BMC Medicine. 2011, 9:122.
[0696] Oren A., et al., (2015). Proposal to include the rank of phylum in the international code of nomenclature or prokaryotes. Int. J. Syst. Evol. Microbiol., 65, 4284-4287.
[0697] Parks, D. H., Chuvochina, M., Waite, D. W., Rinke, C., Skarshewski, A., Chaumeil, P. A., and Hugenholtz, P. A Standardized Bacterial Taxonomy Based on Genome Phylogeny Substantially Revises the Tree of Life. (2018) Nature Biotechnology.
[0698] Peterson L W, Artis D. Intestinal epithelial cells: regulators of barrier function and immune homeostasis. Nature Reviews Immunology. 2014; 14:141.
[0699] Qi H, Li Y, Yun H, Zhang T, Huang Y, Zhou J, et al. Lactobacillus maintains healthy gut mucosa by producing L-Ornithine. Communications Biology. 2019; 2(1):171.
[0700] San Roman, A. L. & MuKoz, F. Comorbidity in inflammatory bowel disease. World J. Gastroenterol. WJG 17, 2723 (2011).
[0701] Sapone, A. et al., Zonulin upregulation is associated with increased gut permeability in subjects with type 1 diabetes and their relatives. Diabetes 55, 1443-1449 (2006).
[0702] Sayoc-Becerra A, Krishnan M, Fan S, Jimenez J, Hernandez R, Gibson K, et al. The JAK-Inhibitor Tofacitinib Rescues Human Intestinal Epithelial Cells and Colonoids from Cytokine-Induced Barrier Dysfunction. Inflamm Bowel Dis. 2020; 26(3):407-22.
[0703] Schieck et al., (2014) J. Allergy Clin. Immunol. 133(3): 888-91.
[0704] Schindler et al., JAK-STAT signaling: from interfeons to cytokines, J. Biol. Chem. (2007) 282(28): 20059-63.
[0705] Schlesinger N, Brunetti L. Beyond urate lowering: Analgesic and anti-inflammatory properties of allopurinol. Seminars in Arthritis and Rheumatism. 2020; 50(3): 444-450.
[0706] Schroeder, KW, Tremaine, WJ, Ilstrup, DM. Coated oral 5-aminosalicylic acid therapy for mildly to moderately active ulcerative colitis. A randomized study. N. Engl. J. Med. 1987; 317: 1625-9.
[0707] Scioli M G, Stasi M A, Passeri D, Doldo E, Costanza G, Camerini R, et al. Propionyl-L-Carnitine is Efficacious in Ulcerative Colitis Through its Action on the Immune Function and Microvasculature. Clin Transl Gastroenterol. 2014; 5(3):e55-e.
[0708] Sokol H, Pigneur B, Watterlot L, Lakhdari O, Bermudez-Humaran L G, Gratadoux J J, et al. Faecalibacterium prausnitzii is an anti-inflammatory commensal bacterium identified by gut microbiota analysis of Crohn disease patients. Proc. Natl. Acad. Sci. USA. 2008; 105(43):16731-6.
[0709] Sommer K, Wiendl M, Müller T M, Heidbreder K, Voskens C, Neurath M F, et al. Intestinal Mucosal Wound Healing and Barrier Integrity in IBD-Crosstalk and Trafficking of Cellular Players. Frontiers in Medicine. 2021; 8(295).
[0710] Song, Y., et al., Alistipes onderdonkii sp. Nov. and Alistipes shahii sp. Nov., of human origin. Int. J. Syst. Evol. Microbiol. (2006) 56:1985-90.
[0711] Sråtková, D. et al., Efficiency of PCR-based methods in discriminating Bifidobacterium longum ssp. Longum and Bifidobacterium longum ssp. infantis strains of human origin. J. Microbiol. Methods, (2011) 87(1): 10-6.
[0712] Strobel, Methods Mol Biol. (2009) 581:247-61.
[0713] Toshimitsu T, Ozaki S, Mochizuki J, Furuichi K, Asami Y. Effects of Lactobacillus plantarum Strain OLL2712 Culture Conditions on the Anti-inflammatory Activities for Murine Immune Cells and Obese and Type 2 Diabetic Mice. Appl Environ Microbiol. 2017; (7): e03001-16. United States Patent Publication No. 2016/0067188.
[0714] Vaarala, O., Leaking gut in type 1 diabetes. Curr. Opin. Gastroenterol. 24, 701-706 (2008).
[0715] Vaarala, O., Is the origin of type 1 diabetes in the gut? Immunol. Cell Biol. 90, 271-276 (2012).
[0716] Vanuytsel T, Tack J, Farre R. The Role of Intestinal Permeability in Gastrointestinal Disorders and Current Methods of Evaluation. Frontiers in Nutrition. 2021; 8.
[0717] Whitman, W. B., et al. (2018). Proposal of the suffix -ota do denote phyla. Addendum to “Proposal to include the rank of phylum in the International Code of Nomenclature or Prokayotes”. Int. J. Syst. Evol. Microbiol. 68, 967-969,
[0718] Yamamoto A, Itoh T, Nasu R, Nishida R. Effect of sodium alginate on dextran sulfate sodium- and 2,4,6-trinitrobenzene sulfonic acid-induced experimental colitis in mice. Pharmacology. 2013; 92(1-2): 108-16.
[0719] Yang F, Wang D, Li Y, Sang L, Zhu J, Wang J, et al. Th1/Th2 Balance and Th17/Treg-Mediated Immunity in relation to Murine Resistance to Dextran Sulfate-Induced Colitis. Journal of immunology research. 2017; 2017:7047201.
[0720] Ye et al., (2015) PLoS One, 10(1): e0117704.
[0721] Yin et al., (2014) Immunogenetics, 66(3): 215-8.
[0722] You Y, Fu J-J, Meng J, Huang G-D, Liu Y-H. Effect of N-acetylcysteine on the Murine Model of Colitis Induced by Dextran Sodium Sulfate Through Up-Regulating PON1 Activity. Digestive Diseases and Sciences. 2009; 54(8):1643-50.
[0723] Zhu Y, Yang S, Zhao N, Liu C, Zhang F, Guo Y, et al. CXCL8 chemokine in ulcerative colitis. Biomed Pharmacother. 2021; 138: 111427.

The application's sequence listing, which the Patent Office published only in electronic form, follows.

SEQUENCE LISTING (48 sequences)

SEQ ID NO: 1 - RNA, 922 nt, Alistipes shahii
  source 1..922: mol_type = rRNA
  misc_feature 4: note = n is a, c, g, or t
tatnccggtgcttaacaccggaactgcctctaatactgttgaactagagagtagttgcggtaggcggaatgtatggtgtagcggtgaaatgcttagagatcatacagaacaccgattgcgaaggcagcttaccaaactatatctgacgttgaggcacgaaagcgtggggagcaaacaggattagataccctggtagtccacgcagtaaacgatgataactcgctgtcggcgatacacggtcggcggctaagcgaaagcgataagttatccacctggggagtacgttcgcaagaatgaaactcaaaggaattgacgggggcccgcacaagcggaggaacatgtggtttaattcgatgatacgcgaggaaccttacccgggcttgaaagttactgacgattctggaaacaggatttcccttcggggcaggaaactaggtgctgcatggttgtcgtcagctcgtgccgtgaggtgtcgggttaagtcccataacgagcgcaacccctaccgttagttgccatcaggtcaagctgggcactctggcgggactgccggtgtaagccgagaggaaggtggggatgacgtcaaatcagcacggcccttacgtccggggctacacacgtgttacaatggtaggtacagagggcagctacccagtgatgggatgcgaatctcgaaagcctatctcagttcggatcggaggctgaaacccgcctccgtgaagttggattcgctagtaatcgcgcatcagccatggcgcggtgaatacgttcccgggccttgtacacaccgcccgtcaagccatggaagctgggggtgcctgaagttcgtgaccgcaaggagcgacctagggcaaaaccggtgactggggctaagtcgtaacaaggtagccgtaccggaaggtgcggctggaacacctccttt

SEQ ID NO: 2 - RNA, 683 nt, Alistipes shahii
  source 1..683: mol_type = rRNA
tcggcggctaagcgaaagcgataagttatccacctggggagtacgttcgcaagaatgaaactcaaaggaattgacgggggcccgcacaagcggaggaacatgtggtttaattcgatgatacgcgaggaaccttacccgggcttgaaagttactgacgattctggaaacaggatttcccttcggggcaggaaactaggtgctgcatggttgtcgtcagctcgtgccgtgaggtgtcgggttaagtcccataacgagcgcaacccctaccgttagttgccatcaggtcaagctgggcactctggcgggactgccggtgtaagccgagaggaaggtggggatgacgtcaaatcagcacggcccttacgtccggggctacacacgtgttacaatggtaggtacagagggcagctacccagtgatgggatgcgaatctcgaaagcctatctcagttcggatcggaggctgaaacccgcctccgtgaagttggattcgctagtaatcgcgcatcagccatggcgcggtgaatacgttcccgggccttgtacacaccgcccgtcaagccatggaagctgggggtgcctgaagttcgtgaccgcaaggagcgacctagggcaaaaccggtgactggggctaagtcgtaacaaggtagccgtaccggaaggtgcggctggaacacctccttt

SEQ ID NO: 3 - RNA, 681 nt, Alistipes shahii
  source 1..681: mol_type = rRNA
ggcggctaagcgaaagcgataagttatccacctggggagtacgttcgcaagaatgaaactcaaaggaattgacgggggcccgcacaagcggaggaacatgtggtttaattcgatgatacgcgaggaaccttacccgggcttgaaagttactgacgattctggaaacaggatttcccttcggggcaggaaactaggtgctgcatggttgtcgtcagctcgtgccgtgaggtgtcgggttaagtcccataacgagcgcaacccctaccgttagttgccatcaggtcaagctgggcactctggcgggactgccggtgtaagccgagaggaaggtggggatgacgtcaaatcagcacggcccttacgtccggggctacacacgtgttacaatggtaggtacagagggcagctacccagtgatgggatgcgaatctcgaaagcctatctcagttcggatcggaggctgaaacccgcctccgtgaagttggattcgctagtaatcgcgcatcagccatggcgcggtgaatacgttcccgggccttgtacacaccgcccgtcaagccatggaagctgggggtgcctgaagttcgtgaccgcaaggagcgacctagggcaaaaccggtgactggggctaagtcgtaacaaggtagccgtaccggaaggtgcggctggaacacctccttt

SEQ ID NO: 4 - RNA, 326882 nt, Alistipes shahii
  source 1..326882: mol_type = genomic RNA
  misc_feature 325556: note = n is a, c, g, or t
  misc_feature 326660: note = n is a, c, g, or t
agtttatgattataaggaattatgcgaaagatacagatggattgtttgcccggattatcgggaagattagcgcacttacaatcctccaatatattaattacaaaaatgaaaagcctattggcagagttaaatatgcgctattttaattccgccaacgggttatttcctaaatttgcaccgcaatggttcacaaagggccgggcaaggccccgtgtgattaaatgggaatgccgtgaaaatcggcagcagttcccgctgctgtaagttccgagagttgccgcgacacgctgaaagccactggtccgagagggccgggaaggcgttgcggcaggaacgagccagaagacctgccttgcagcttcccgacgaggaagaatcttttttcggggtgtgtctgcggagaacggagcatcgcaagtcttggtatttcgtggctgaaatacgggtatggacgtgaaaaaggttcgattccgggaggttccgggaccggattttttattttacgaacatacttaaaatcagacgaacgatgaaaaaactcttgcttttcgcatttgcggcctgcgctttggccgcctgctcggacgatgacggcgattcccgcgtccctgcgactgcggttgtgctcgattgtacggaaaaagaacttgcagtcggcgaaaccctgcaactcaccgcaacgccggcgccggcgaataccaccgacgacgtggtgtggtcttcggatgccgaggagttcgcgacggtttccgaatcgggtcttgtgacggccgtggctgccggaaccgccaaaatctcggcgacatacggttcggtgtcggcaacctgtaccgtgcatgtgagcgaacccgatccggaatttgaggtgatttcgttcgaaacgagcgaaggaatgctcgatgcggctgaaatgcccgttgaattgcgcgatgttacgattgccggggactgggccggcggtgactttagcaaagtattgtgcggtaaggagtatatgatggacgaggatttcaacggaacttatttcgacggtctgctctttacgacggctgataagaagattggattcgggtcttatttcactgataacaaatacagttcctatggggcttccgacgtttggggcggattcgtcctttcgcagaacttcagcaagaggagcaacggcggttcggccgattacagtaaggacgggttttcagcatgggcgacggccggtgccaatgcaagtgctacgtttgcaatcgcttacgacaatggatacggggtttacaattaccatacgccgaaggtcgaatttaccgagccgcgcaaagtagcctatttgtacctggccaatgcgactgtggctgcgcaatataccagccgtgttgagaattactggttcaaagtcgttgtgacggggtatctcaaaaatgccgagggcggtagcgtggaacagacgctcattgagggtgaaaacattgccgccgactgggtgaaggtcgattgttcgtcgctgggcgaggtggatgaacttcgtttcaaggttcagtcgaacgatatgagcggcaattatctgaactgccctgcttatttctgtatcgacgaaatcggactgattgccgagaagtaatttagagattagtttccggagaaagacccgcaggacttcatcgttttgcgggtctttcgtatcggggggggagggatgtccggacggaacgggcttattcgtcccggaactccatgcggcagggcagcaccaccgattcgggtgccgggcggacggagccgggcgattggctttcgcggatttgccgcagcaggaggcgcacggcgtgggcgctgatctcttcgacggggaagcgggcgacgctcatccggggggcggccaggcggaaaagcgggtcttcgtgcatgcaggcaagcccccgacggccgtcgctgatgtcgatgctccggtcgtggaaatagcgcagggcctcggtggcgaggatatgcgtggtgaagaaaaagccgtcggtgtcgggaaccgtggcgagaatgcggtcgagcgtatcgcagacgtgctgccggtagccggcataggcgacctctccgtagaggcggggatcggcgtgcagtcccgcttccgccagcgcgcggaggtagcccctgtgccgcagttccatcgtcgggaggtgggggaaggtcgtgatgatggcgattttgcggaatccccgggcggcaagatgacggaccagcgcatggctgcccgcctcgttgtcgatcaccacgcagccggcgtccgttttcgcgaggcagcggtcgaacagcacgaccgggcagccgctctccgcaaggcggccgacctcgcgtcccgaagcgtcggccggggcgatgatgatgccgtcgacctttttcgaccggaaaagccgtatcagggcgttttcccgttcggtttcggagttcgaaccggcgatcatcagcgagtagccttcccgctcggcttccgactcgatccggtcggcgatgtgggcgaagaaggtgtccgaaatcgaggggaggatcagtccgatggttttcgatacgcccgtgttgaggctttgggccagcaggttcggttcgtatgccagggagcgggcgcaggcgagcacgcggctctgtgtctccgcgctgatcccttttttgtcgccctgccccgagaggacccacgaaacggtcgttttcgagaggttgagcttgcaggctatatccttgagtgacgctcccacgatttatccgtataagcaatgctctacaaagataaaatttttccggcattcggcaaataatccggccgtaaaatgacgccgggagttctgtatccggggcgtggaagcgaaagtctcccgcagggcaggccctgcgggagacttcgtatcgggaatgcgcttatttcgagatcaggttttcgcgctcgatgtccttgaaatagcggtaggtggctacgcgcagctcctcggcggccgggtcgtcgcagaccagaatgccgttggggtgcacctggagggccgagatggtccactggtggttgtaggagccttcgacgccgtggcgcaccgcgcgggctttcttgtggcccgtggcgaggatcagcaccttcttggccgacagcaccgtgcccacgccgaccgtcagcgcggttttcggcacgagcgagatgtcgccgccgaagaaccgggcgttgacctggatcgtgtcctgcgtcagggtcttgaggcgcgtgcgggagttgagcgacgagaacggctcgttgaaggcgatgtgtccgtcttcgcccacgccgcccatgaagaggtcgatgcccccggcctcgacgatgcgcgcctcgtagtcggcgcactccttggccaggtcgtcggcgttgccgtcgagaatgttgacgttctccggcctgatgtcgacgtgcttgaagaaattgttccacatgaacgagtggtagctttcgggatgctcctcggggagacccacatactcgtccatgttgaacgtgatgacgttcttgaacgacacttcgcccgtcttgtggcggcggatcagttccttgtaggtctccagcggggtcgagccggtcggcagccccagcacgaagggcgacgaggtgtgctgctccttgttcttgatctgggcgatgatgtaattggcggcccactgggctacctgctggggggtattttcaatgattaagcgcatggggtgattttttaatgttcaatgcttcatttttttaatcgaagtttttgtgaagatgcgctaaaacatcttcacaaacacctcgatagcctggtattcggccatgccgagctggtcgtagagcttcgcggtgttctgtgtgcgctcctcggcccgctgccagaactcgcggggatcgctgcccgggaagggcatgatgtccttctgcgagaggtggcggtagatggcgtggcgtttcataatcagctcgtcgggcgacaggggcacggccatgtccaccatgccgaggtcccactccatccaggcgccgcggtagagccacaggtggcactccttcagccactcgtcgtccttcacgacttcgagggcgccgagcacggcctccatgcaggtgcggtgcgtgccgtgggggtcggcaaggtcgccggcggcgtagatctgatggggcttgatctcgcgcagcagcttgacgatgatttcgatgtccttctctgtgagctggcccttcttgatgccgcccgtttcgtagaacggcaggttgaggaagtgggcgttggtgtcggggttcagtccgaacgagcgcacggcggcacgcgcctcggcgcggcggatggcgcctttcaggtcgagcagcgggcgcggctcgggttcgcccttcctcttgccggcgatgaccttttcgacttcggcgtagtggttgccgtaacccagttcgcgggccgtgtcgatgttttggagcaccacgtcgtcgtgcacggccacgttgcccgaggtttcgtaagccacgtgcacgtcgtgaccttgctgcacgaggcggatgaacgtgccgcccatcgagatcacgtcgtcgtcgggatgcggcgagaagacgatcacccgtttggggaagggcgacgaaggcacggggcgcgtcgagtcgtcggcgttgggcttgccgcccggccagcccgtgatggtgtgctggaggtcgttgaagacgtcgatgttgatctggtcgtaggcgcggccctgttcgagcagttcgcccagcgagttttcgatgtaatccttataggtgagtttcaggatgggcttcttcaccacgccgcagagccataccacggccttgcggacgaatttcggcgtccattcgcagggacccaccatccacggcgtctgctcgcgggtgagcagctgcgcggcattctcgtcgatcaccacctcgatattctggtgcgcctggaggtacgaggcgggaacctgatccgtgatctcgccctcgacgacccgctgcacgatgtgggccttctcctcgccccaggccatcaggatgatgcggttggcgcgcatgatcgtgtcgatgcccatcgtgaccgccatcttgggcgtgttctccagcccgaagaaagcgcccgactggattttgcgggtgttgtaggtcagctgcaccagccgcgtgcgcgagcgggagtaggaccccggctcgttgaagccgatctgtccgtcctcgccgacgccaatgatcatcaggtcgatgcgccgcaccgagtggtcgtacgacgcgcagtattccgaaacgcggtcctcgggaaccgtaccgtcggggatgtgcacgttctcgggcaggatgtcgatgtggttgaggaactcctcgtggatgcggtagttgcggctctgctgttcggtcgaccggatcgggtagaactcgtcgaggctgtaaacggcgacgttccggaagctgatctgcccttcgtggtggcgtttcaccagttcccggtagagacccagcggcgtgcggcccgtcgtgaggcccagcacgaagggctgcgactcctcgtagacctcgttcgagcagtggatttcgttgtacatgcggatcgccttgacgatgttgtcggcgacgtactgcacgccttcgtactcgttttcgtagaccttggtgtggatcttctcgtaacgatggatgatgtcgcgcggagccgattcggaaatcaggccgccgtctttgggaagtgaatacttgttgttcatacgtttatgtaatttgttaatctttctctctgtcggtttgctgccgatcgtgttgtcgccgccgttggtgtcgtttacaagtctgaccccaccccaaatccctccctcgggaggggacttaaggcgcaaaaacacgcgccttgactgctgtggcggctcggcaattcgcaagcgattgcgctcgcctgttgcccgcagttgtcgcatcgcgaccggattgtctcttggctttcagcttttcacttttcactttttcacttctcgaacgtcacctccccgaaaaactcgggacggtggaaatcgggtttctccgtccggatcggccgccacgagaggaaatgggggtgcgagaggttgtcgccgcatttgtagaggttcatgcgggccttgagaccgctccagtcggtcagcgcatggcggaaaagcgcctgcggggggatggccagcgtgagcgaccagcggttgtcgccctcgcgctcggcgaaaggctcgccgcagggaagcgtcgtgtagcgtttcacgcccgccagcacctcgggcgaggcgtgctcggcctcggtccgggatttgcgcgccccgagcagcatccgtccgatgcaggtggtttcgaaattgtagtacatccctgtgtcgggcgcgatgaagaactccgcgcacgagtcggtccacacctcgccgttgtcctccgtgacgagcgccgccgtgtagcgttcggcgacgtcgaagcgcagcatcagccagtcgcccgtatggaacatccggaagctgacttccggggcgtagggaaattccgcgggccagttgcagcacgccaccggcagcggctcgattccggcgaatgcctcgtccacggcggcccggtcgtcgggcgcgatgcctgctatcttgcgaatttccattccttatttgtatttggcgacggtttcccgtacgatttcgcacatcgtgccgtactgctcttccatgctttgcagcagtttgtactgggcgcgggtgcgcacgaggttgtgctcggggtatttcgttttgtaataggtgtcgccgtcgatgtagtccatcaaaaaacgcagcacctgctcgaaggtgatgtaacgggccgagaatgccaggtggtcgatttcggcctggttgagctgtccggcccgctgcgacagatagccttcggtataggcgcggaacatttcgagggacatgcccacgcgcgaaaggtcgcggtcgtcctcgtcgcccgtgttggcgtaggagcggatggcgtcgccgaaatcgttgagcgacgtggagttcatcaccgtgtcgaggtcgatggcgcacagcacctcgccctgcttgtcgaagaggatgttgttgattttcgtgtcgttgtgggtcacgcgcgtggggatcgtgccgtcctcgaccttcgaccagaacgagagcatctcgtcgcggcgcgattcgatccagccgatctcctccgcaaggtctttcacgcggcctgcggcgtcgcggcgcagcgcctcgtcccactgcacgaagcggtggcggatgttgtggaagcccttgatcgtctcggccagcggctcggtgaagtccgccagctgggcctggaacttgccgatgccctcgccgcccttgcgggccagttccggggagtcggccttgttgtaggcgatcgtgtcgctgatgaaaaccgaaacggcccaatattcgccctgtgcgtccacgtgatagagctttccgtcgcgggtcgcaaccacggtcatcgcctcgcgtctggggtcgcccccggcggctgcgacacggcggcggatatggtccgtcactttgcggatgttctccatcatggccggaacgtcgggaaagatgctcttgtttttgcgctggaggatgtaatccggcgcatcgcccgccgtgcggacgatgaacgtgtcgttgatgaatccctcgcccagcgagtcgattgccgtgatagcgccttccagcgcgaactgcgacgctatttcctgtaattcagccttcatacgatgaggttgtttcggttttggttgttaaaggttaagtttcacctccaaagttactggaaaaaacgcagaaatgcaaccggatattgtgaaaaagcccgcctttcttgctgaagggcgggcttgcgaaaactttcggacgggttattcgatcgggtcgatcaccgtgaacgtcacctcgtagggagcgggcgccgactgtccctggtagttgcccccggcgacgatgaaggtcaccgtgtaggtccccggctcggtgtaggtgtacgagtagctcggcaggtcgtcggtcacgcccttgatgttcaggcccgtgtcgggcgagatcgtgttgagcgcgacgggctgcatgaaggcccactggtcgatctcggggaaagctccggcgctgaagccctggaagacgatattggcggtgttgttcgctcccggccggccctggaatttcaggttgccgttgcccgatacattatggatataggggttgtcggcgtgctgcgaagccagcgagaaggggacgaattccatgtccgggtagttgtagacctgcgtgtcgtggcccttgaacttgaccgtgatcttcggattgatccgataggtgcgcatcgtggtcttggggtccggatagaaaaggtgcatgccccacgaaaaacggtcggcgaaccgggtgatgtcgtaggtgtaggtttcgaacttgttcgcgttgttcggcgtgaactccagtttggtccagtcggcgcagtcgttcgccgcgatggcttcgaccacggggcggtcggtggcggcgtcgctgccgttcagccccgcgaatttgttgcccgcaaacaggacgaggttgttcagcgtgccgtactgctggctgatctcgatctccagttcgcacgactcgatgtcggcgatgtcgaccttcgtgcggttgcggtgcttgtactcgtgtcccgtgtcgcccgtccagacggtgatgaagtcggcgttgccgctgaagttgaagaccaccgggtcgcccgtgcggtaggtgttcgtcggcgccagctgcaccgagaactccagcggctcgtagatctcttcgtgttcgcacgaggctgccgcggttgcgagggccagcgtcgccgcgaggtatgtgattcgtttcgtattcatcgtatgctctgcaattaagcgttttaccataaggggttctgtcggagcgcgtggttcaccgccagctccttggtcggaatcgggaggtagatgtggcgtgccgtcacgttggcgtagttcgccgacgcatagttcgtatagctgacgttgcggtacttgttctccgtcggctggttggtcccggcgttgtgcatcttctcgacgaacgtgccccagcggatcaggtcccacttgcgaagcccctcgaaagccagttcgcgtccgcgctcgttgcgcaccaggtcgcggaacgaacggtagtcgcccagcaggctctcgtcggtcttgacgcccgcgcgtttgcggatttcccggatggcatccttggcctggtcgtccggcgccccggcgtattcgttgatcgcctcggcgtacatcagcagcacgtcggcgtagcgaaggatcggaaagttgatcgtcgtgtagaggctcttggccgacatctgtttctcgtagaccgtctcgcggcgccatttgccggcgttgcggacggcgcacatcaccgtcgggtcgtaaaccagatcggcggggtcgaacgcgtcctcgatcgtctggtccagcccctcgatgtcgggcatggcgaaattgttgttgtagacccacggcgtcttgaacatgctctgcgtctgttgcaagtagcgcgtcacggtctcacccgccttgttcttgtacgagattttctggttgttcattccgcggtagttgtagcccggcaggttccacgtcagccgcttgtcgatgaccgtggcgctggccgtttcgtctgccgtgcggtcgttctcccagtagagctgccagagggtgtaggagccgttgtagtagccgtaggagtagttgcaggcccactccgagtagttggtcgttcccgactgcgaccgcagaccgatcaggtcgccgatgcggccgttcgtccagtcggtcgcactggtgcggtcgccgaggaattcggcctcccacattgattcgtggaactgcgtgtcgtactggtcgcggatcatgttgatgaagatctcctcgtagctctcgttcaggtcgtgcttgtgcgaggcgatcacctcgttggcccagtaggcggcgcggcggtacatctcctttttatccagtccgtcgatctgcttgacgctctcgccggccatgaagagatagacgcgggccagaatgccctgggcgacggtctggctgacgcgcgagggggtgttgtcgatgggctcgtagaggtcgggaatcgtggcttcgatctcgtcggcgcaccatttgagcacctgctcctgcggcgttgcggccatctgcacgtcgttggggttgggcgaggtggtcgctttgacgcgcaggggcatatcgccccacgcctgcgccagcaggaagtggtagtaggcgcgcaggaaccgcgcttcggcgatgtaaagcccgatgtccaccgaaagtttcccggggtcgatctccgtcttttcgacggcctcgatgtagcggttggcgttcttgatgccttcgtagagcttcgaccaggtgtcgtagatcgccgccgtgccggcgctgtggttgtagcggtcgggacgcgattcgctgttgttgtagttgttgaagtagcagaggtcgtcggcgttggcgatttgcagcgagtagtagttgccgtagagcgcttcgctgttcagcacgccgtagacgcccgccagaccgtagatcagcttttgttcgctgttgtagtagccgtcgtcggggatgatctgcggatcggtgtcgaggaagctgcacgccggaagggcggcggtgaacagcgccagcgttcccagtttcaatatgcttttgattttcatggcgtaatgttgcgtttaaaccgttagaatgtgaggtttacgccggccgtgaagccgaatgcgcggggatatgccgaccagtcgaatccgggcgtcagcaccgagttgcgggtcgatacctcggggtcgggaccgctgtaacccgtcagggtccagatgttgtcggccgagacgtagacgcgcatctggctgatgcccgccttgcgcagcgaacggctcggcagcgtgtagcccagcgagacgttcttcagccgcaggaacgaaccgtcctcgatcacgcgcgacgagtactcctcgcggccgacggcgttcacgcgcggaatgttcgacgcgggattctccggcgaccagcggtcggcgtaggaggccagctggttggtctggctcctccatcccgattcgaagaccagccggttggcgttcagcacgtcgttgccgtagctccacgcgaagaagatgttcaggtcgaaattcttccagttgaagttgttgccgaagccgcccgtgttgaggggctgtccgcagccgatgatcgtgcggtcgtagtcgtcgatgacgccgtcgccgttcatgtcgcggtatttcatgtcgcccggctgcatcgcgttgcccttgaacgagggaacgccgctgacgaggttgcccttgtcgtcgaaatcctcggccttgtaggtcccgtcgtagatgaagccgtacatcatgcccgtgggcttgcccacctgcgagatgtaggggaactgcgagttgaagcgcgtctcccacgatacggaactctggagcgtgttctgtccgtcgaccagcccgagaatccggttgcggttgaaggcgatgttgaacgacgtggaccactggaactgacgggtcttgacgttcaccgtttcgagcgtcagctcgaagccgcggttgcggatcttgccgatgttgagcatcccctgttcgaagcccgacgaggcgggcagcagggcgtagagcagcaggtcgcgcgtcaccttgtcgtaccagtcggccgtcaccttgatgcggtcctcgaagaacccgaggtcgagacccgcgttccactgctcggtggtctcccacttgagccgctcgttggccatgttcgagacgtagtagcccggcacgcgctcgccgccgaacacatagtcgagcgagttgcccgaacccgggttgacggtgatctgcgaatagaagtcgtaaggggtctgcgtgcggttgttgcccgtcaggccccacgagaggcgcaacttgccgttgctcatccactcgctcttcttcagcagattctcgcggttgaagttccacgaaaggccggccgaggggaagtagccccagcggttgtcggaggggaatttcgacgagccgtcggcgcggaatgagaaggtcaggtagtatttgtagcggaaattgtagttggcgcgcaggaaggccgacatcatccgccagtcgtagtagttgctctggaccttctggtagttgcccgtgtggatgcccgcgatgcccagctcctcggaggtgatctgcgtcgacgcaacgccgtcgtaggtgttcttctgcccctggagcgagagtcccgccatcaggtcgaggttgtggctgcgccccaggcgcttcttgtagttgagcgtgttttcgttcgaccagctcgtctggtcggtccagtagatggcgccgttgacgcctttgccgctgggcgagccggcgtagcccgtgtaggtctcgctgccgttgaactcctcgcggcggcgtttgttcaggacgtagccgcccgtggtcttgaacgtcaggtcgggggtgatcttccacgtcagcgccaggttggcgttgaggtagtccaccagcgtcttgcggtattcgttcttggcggtcttcaccgggttgaagcggtagtcgttcgatccgtctacggcttcgtcgagcatcgaatcgaggatgtcctgtccgggaggcgttacggggcggtagccccagaccgagtacatcagccagcccgacgacgacgaggtggtctgcgccgtggtgggggtcacgccgttggtcgccgtgcgcgaatagttggcgttggcgttcagcgtgagttttttcgagatgggcagcgtgaagttggccttgccctggtagcgctggaagttcgaacggatgatgatgccgtcctggtcgagcgccgagaagcccacgttgtagcgcagcccctccttgttgccgcccgagagcgagacgttgtagttctgctggaaagccgtgcggtagagctggtcctgccagtcgatgcccgggatgtggcggtagtcgtcgagcgtcagtccctcgctgaaatagctcttgttcatcgtctcctcgctgatcagttcgctctgaagccggacgaattcgtaggagtccatcaggtcggccttgttggcgatcttgttcagggagaacgaggcgctgaagttcaccgtgggcttgccctcgttgccgcgtttggtgttgatcacgatgacgccgttggctccgcgcgctccgtagatggcggtcgccgaagcgtctttcagcacgtcgatcgactcgatgtcggcggggttgatcgacgcggcgaacgacccttcggacgggaatccgtcgatgatgtagagcggggcgttgctctgcgtgagcgagttgtttccgcggatggtgatattggcttcggcgcccagcgagccgtcgcccgtggtgacgaccacgccggcgatgcgtccgcccagcgcctggtcgaagttggtgacgttggccttcatcatcgtacccaggtcggccttggccaccgagccggtgaggtcgcgccgcgtggtggttccgtagccgatgttgacgatctcgacggcgccgatctgcgacgcctcttcggtcatcttgacgttgatcgccgtacgtttgccgacatactcctcgacggtcgtgtagcccagataggagaagaccagcgtctggtcctcccgggccttgatcgagtagctgccgttggcgcccgtggccgttcccgactgcgtccccttgatcaggacggttacgcccaccagcggtgcaccgttggcgtcaaccacgcgtccgtccacggcgttctgcgcaaaggcgtcccccccccggagtaccgatagggtcaccagcgctgccgcggccatgcgtttaagtgcttttttcataaataaatcaggttgtgggtgaaaatggttatttcttcttgagccggaactccacgggctgtccgtggcggcaggttatcttcagcagcgttccggtgtcgtgggaaacggcctccacgccgggatattgtgcggcaagctcccatgcgccgtccaaaagcacctctttttcgatggggcggctctcctgacgcgtggtgtaggtcttctccgtgaggccgaggtcgggcgtgcagacgctcatcacgacctgtccgtccgtgtcggtgcgctccatgacgatcgactctccggtcgctttgcgcacaagcccctggcccgtgtattccccgaagcagacgtagcccgtgatgcccgtggcgaggtccttcacgacgtgggccgtgttgtcccggcgcagcacttcgtagccgtctttcttgatcaggcgcgtgatctccttgttcgtgggctggatgtagaccgcatattcatatccggcctgcttgggggcgcggccgtggtcgatccaggccgtggcgaagttgcccgtctggggtgcgcgggtcttgtcgttgggcgaggtctgctcctttttggtgatgttcaccgctgcggcgttcttcaccacgtagaaattgcccttcgtgtcggagagcgccagccgctcgccgcccttggaaaggttgagcgggaaagcgtcgtaaagctcgccgtcgacttctatctgttcggccgggctgtccatccgcagctggaaaagcgtcgtttcggtggggtatgcctggttgtcgttgtcgatgccgctgccgaggaagaccatccggttgtcgaagcagaagacggatttgtacgccgtggccccgggggtgaagttcttgcggtccttttcgacgaagtgcagggccagtatgccgttgcggccttcgagcgacgaggcgcccgagaagcgctcggggttgcgctccatgagcgtccccggcagcgggctttccagttcggggtagggcaggtggatggtcgtggcgcccggcacgcggttccagtcccagccctcctgcacgaatccgctcgccgcggccgagacgggattgcccgaaccgatgatcggcgccgaaccgtagctctggtagcgtccgtagcggttgtccttggtataaatctccgatccccagacatcggtgttgaatgctttgagcgtcaccatccagtcgccgcggcggtggatgcccgcggccccgtagttatagacgaagaatcccgagggcgtgggacccgccgaaatcccctctttcctgaataggctgttcaactccttgtccgtgcctttcaggcgcaggtaggcgcccgccagttcggggtccgcgcccttgccgctgcctgtcaggtcgcccagcgcggccagataaccgaatgcgttgacgtcggcgtcggggatgcggccgttcttgccgaagggatggcggccggccaggccgaggccccagtcgcgcagatcggtgtagctggccatggtcatcagcgccagcttgaagttgcggcgcgcctgctccgagagggtgaaatccgttccccgggttgctttgcagaagtagccgatcatggcgaacgcgccggtcgagtaggcggggtagaagccgccgtggtggaaggtcgtgccgtcgggcttgatgccgccgatggtgcccggcgtgaagccgaggctccccgagagccatacgccgaggctcttcatggcgcggtactgttcggcctcgtcgggcagcatcagcgcgctgacgatcttggggatgagcagcgtgtgccacgagtcgagcagctcgtcgcggccgtagacgtagggtttgcgggtctccgccaggccgctccagtaggccagcaccttgacgtattcgtcggtcttgccgcgtgcggcgatcttgtcgcgcatgagccacatggcgtcgtagatcttgcgtatgttgtagccgtagtggtggttggttccgttgccgtggccgaaggcgaagccctggtcgatggcgtggtccatcaccagaaagaaatcgtcgtcgtattgcggatctttgttgatatggctgttcagcgcgaaggcgttgagcatgttctcgatgtcgtccaggcgcagttcgcctttcgggcggttgcactcgtcgttcgagagcagcggggcgccgatgatcccgccgtcgtcggtgcggcggatcgcggccttttcgaaggtcgcccgggcgcgcgggatgatcgtgccgttgatgtagttggcgctcgacatgttggcagcgacgatgctttcgatgcgcgatttcacggcgtcgagctgggccttttctgcgggcgtgacgtcgcgcagcggctcttcgtattcgtactgctcccactcccagaggcgcgcccagtgccacaactcgcgagagagattgcagttgttgccgggaatctgcttgtcgggggtgatctggtcgtggagcttgacctcggagaaggtcaggcggtcgaggaacagctcgccgctttcgaccccggcgggcgtcgagatcgtcagccgggatacctgctgcgaggcgtggtcgcccggcatgtcgttgtacttgatccagcaggcgcgccagcccgtgaaatccatgtggaaatcgaaccggtaggggacttcgccggtgggcgtctcgaacgagaaccgcatgtcggcgtcgacggccctggggttgtagatccagagcatgacgcccgcgcccttgacccgcagcgagcgcatcagctgtccgaagtcgttgaagcggagcgtcgacggcgcgctccacgaccagcgcagcgaacggttcccgtccttgtagtggaggccgctcaattcggccgtgctgttttcgccgcatacgaaagccttgggaatttccgtttcgaaactgattttggcgtcgattgccgcagcggcatgctggccccaaagcgtgccgaatagtatccaaatcgctggtacagcgtgttttaatatatttttcatagattcatatttggtcaaaaataaataaagaaattggttcgccaaaatttttcaaagagaaaataataaaaattttacattcatcagaaaagattattaaaatatgttgcaagtccgaaaaaaactttacctttgtccgaaaagctgatttggtttaccaaaataatcatgttaatcacctaatttatgaagatcttatttaaatatgcgaccgtcgcgctcctcctggcaggggctgccgcctgctcgcaaccttcgaagcgcgcttcgatcattgacgaaaacatcgccgtcgctgaaaagcagatcggcatgctggccgattcgagcgagacgggcggtgtgatccgcatcccctcgacctggaagaacgggcggatcgactacgtgcccgtcgacgactgggtgagcggtttcttcgccgggacgctgtggtacatgtacgaactgacgggcgacgaggcatgggccgcgcgcgcacgaaagcataccgagatcctcgattcggtgcagtacctgcaatggcatcacgacgtgggcttcatggtctacgacagctacggcaacggactgcggctgaaaaacatacccggctacgaggatgtgatcgtccagacggccaagtcgctcgcgacgcgtttccggccggtgccgggcgtcatccagtcgtgggacgccgaccgcggctggcagggcgagcgcggctggcagtgcccggtgatcatcgacaacatgatgaatctcgaactgatgttcaaggccacggagttttcgggcgacagcacctattataatatcgcggtgaagcatgccgaccgaacgatgaaggagcacttccgcgacgattacagctgttatcacgtcgtggactacgacctgacgacgggcgacgtgcgcggacgctgcacggcgcagggctatgccgacgattcggcgtgggcgcgcggacaggcatgggccgtctacggctatacggcctgctaccgttacacgggcgacaaacgctacctcgaccatgcgcggaaggtggccggtttcatgctcgacgacaagaacatgcccgccgacctggttccctactgggactacgatgcgccgaacattcccaatgaaccgcgcgacgtctcgacggcggccatcatcgcttcggcgttctacgaaatgtacacctatacgggggacgggctgtataagcagaaggccgaccggatcgtcgagtcgctctcgtcgccggcctaccgcgctccggtgggcggcaacggcgggttcctgctgatgcactccgtgggcagcatcccgcacggcagcaatatcgacgtgccgctgaactacgcagattactatttccttgaggcactgatccgcaagggccgcttggaggcgggcgaacctttgttttaaaccggatgcccatgtataaactgttgtttctcgccgctgcgtcggtgtggtcgtgggccgcaccggcgcagtcggtgcgggaggtcgccgatgcgcggattctttcgttcgaggagtctgcggcgcctttcactgcgtcggaaggctcgtcgctgtccgtctcgggcgaccattacaagcacggcgcccacgcgctccgctggcaatggtcgcgggcgggcgcccgggtgcgcatcgaatccccggtgggttacctgtcggaaaatcccaatcccagggagacctccgtttcgaccttcgtgttctgggtctacgccccgaaggcgctcgacgggaaactgcgtttcgagttccgcaaggaggggcgcacctgcgcgtggttcgactacggactggagttcaccggctggcgcggggcatgggtggctttcgaccgcgacatgcagggccggcccgaggaggggatggacgaactggtcgtcacggcggagggcgtcgaacggggcgagttgtatttcgaccacctgattctctcctcgtttcaggacgtgcggcaccatacggccgatttccaggcgccgttcatcaacgccgcgaccacgagccactggctcacgctgctgcaatcgtggcgcaatccgatgcccgccctccccgccgcggtcggtgagggggagcggcgcgatatggcgaccgtcgaacggcgtctgcgcgaactgctgctcgaaggccggaagccgatggcgatgaagaccctgcgcaaacgcttcgacgcatacggcattgcggaaaattccgacgggacgcttcggggcaagccgatctggttcgtgcgctatgccgagacctatattaatctgggccatcccgatgtcggcaaactgttcaacgacaacggccagacgctgcgcaaatacaacgacttcctgttccaggtcgccgtggcccacgatgccgctgcggacgccgccgagcgggcggagctggagcggatgtatgtgctgctgacgcggcatcttctggatcagggcttcgccgcgggaagtgcgcagggaaccctgcaccacttggggtacagcatgcgcaatttttacacggctcccgtcatcatgcgcgacgtgctgcgtcgcgccgggctggaacacgacgtgcagcaggctatggagtggttttcgggcgtgggcgaggtgaaacttccgccggcggagccggggatggacatcgacgcgttcaacacctcgctcgtcggccgtctggcgagcatcgtgatgctcccggacacctcggtgaaggcggcctggctggaggcgttctcccgttgggtcgacaacggatataaggtcaccgaggggaccgggccctgcttcaagagcgacggcacggtcttccaccaccggcgtcactacccggcctatgccgtggacgggttcagcggcggggccgtgaatgccgtgtggctgttgtcgaagacgcagttcgcggtgagcgccgaaagccatgccgttctgaaacgcgcgctgctcgaaatgcgcttctactgcaacctgcggtcgtttccgctggccctttcgggccgtcatcccgacggccgcggcgaactggtcccgtggcattatgcccggctggccgtcgcgggtacgcccgacggccgcggggagatcgacccggagctggccgccgcctacctgcgtgtggcccaaggaaaagacgcttatacgcggctgttcgccgaaaagggcttcgctcccgaaccttcgcctgcggggaaccgcgtctacggctacaatgcctcggtgtcgcaccggcgcgccgactggctggtgaccgtcgcgggccacagccgctatctctggtcggcggagatttaccagggagccaaccactacggccgctacctgacgcacggcagcatgcagctgcttgcagacggcgatcccgtgagcgccttcggcagcgggttccggcaggagggctgggactggcggcacattcccgggacgacggcgctcgaaatcccgatggagcggatgaaggccgacatccggaacgtcgacaccgcgtcgggctacgaggagatgctcctctccgacgaggccttcgccggaggcgtcagccacagggaccgcgacggggtgttcgcgatggaactccacgagcacgacaaatacaacggttcgttgcgggcgcgcaagtcgtggtttttcttcgacaaccgcatcgtctgtatgggttccgacatcgaaaacaaggccgagggcggtgtgcatacgacgctgttccagaattttctggcggacgcggccgatccgctcgtcgtgaacggcgaggcggtgacgcagttcccctaccgggccgaacttgcgggcggcgccgtcctgcgcgacaacctgcgcaacgcttacttcgtgccgaaaggtagggtagtcgtttcgaaatcacttcagcgttcgctcgacgaggagaccgacgccccgacgcagaacaatttcgcaacggcgtggatagatcacggcagcgggtccgtcagcggcggcgggtacgaatacatgctggccgtgcacgcttcggacgaagaggcggtccgctacgcgcgggaacttccctacgaggtgctgcgccgcgacgcctcggcgcatatcctgcgcgacaagccgtcgggcattacgggctatgccctttttgccgccggtaaggtgggcgaggggttgctggaaagcgtttcgctgccttcgctggtgatgatcggcggggatggcgaagggctgacggtgagcgctgcggaccccgacctgcgtttctacgaggggccgagcgacgaggtgttcgatgccgacggcaggcgcgccgagcggagcgtctactcccgcaagtggatcgacaatccctcgggagagtcgcagctggaggtcgtgatccgcggccgctggcagtccgcagacgataggccggagtgccggatcgaacccgcgggcgaaaacaccgctttgatcttcacgagccgcgaaggtgcgacgcgcgaagtgaacctgattgaaatgaaataagacacgatgttgaaaattagaattgcaattccgtttgcgggcctcgccctgacggcctgcgggcagtcggaggccgggcgccccaacgtgatctacgtatttccggaccagtatcgcaactcctcgctggggttctggagcgatccggagttcgccgccgaggtggggtggaagggcgatccggtcgcaacgcccaacctcgaccgcttcgcccgcgaagccacggtgctgaccgaggcggtgagcaatttccccgtgagcagcccccaccggggcatgttgctttcgggcatgtatcccgagcggaacggcgtggtgctgaactgcatgtcggagcgtcccgaaagttcgctgcgcgaggacgtcgagtgtatcggcgacgtcttctcggcggcgggctacgactgcgcctacatcggcaagctgcacgccgacttcccgacgaagaacaacccccagcgtccgggaacctacgtcagcgacgccgttcccgagtgggacgcctacacgccgcccgaacgccgccacgggttcaactactggtactcctacggcacctacgacgtgcacaagcatccccattactgggataccgacggcaaccgtcacgatgtcgacgagtggtcgccgcggcacgaagtttcgaaagccatcgaatatatcgaaaacaagggcggcgtgcgcgatcccgaaaaaccgttcctgatgatgatcggcatgaatccgccgcattcgccctacgcttcgaccgacgactgcgacctggaggggtatgaacgttacaaggacaagtcgctgaccgaactgctcgtgcgagacaacgccgacacgacgatggccaaggccgccgccgtgcgttactatttcgccaacgtgagcggtatcgatcgcgagttcggccgcctgctcgctgcgctggacagggcggggcttacggagaacacgatcgtggtcttcgcttcggaccacggcgagacgatgaccagccattcgaccgacgaccctaagaactcgatctggcgcgagtcgctgaacattccctttctggtgcgctatccggggcgggtgccgcaccgtgtggacgatctgctgctctcgacgcccgacatcatgccgacgctgctggggctggcgggcctcggggagcggattcccgcgagtgtcgaggggcgcgactactcggccgtgctgcggcaggacgccgtgcagcccgaacgcccgcgcgctgccctttacatgcgcaacctcgacggcgggcgcgatgccgacggactggtccgcggcttcttcgcccaggcgcgcggcgtgaagaccgcagcgcatacgatggagctgcgtatcggccgcgacgggacgctcgaacgcgtgctgatgttcgacgatgcggccgatccctaccagctgcacaacctcgcgccggaggagcatcccgcgctgttcgccgcgctgtgccgcgaactggctgtgttgctgcgcgacaacgacgacgtgtggttccgcgagggcgtcttgtccgacgtggttccctatgatacgaataactaacaatcaatcggatatgaataaattgtttttgtggattgcagcggcctcggcctttgtgctgcaatcgtgtgagaacaccgacggcatccgcgacgagatcgggagcctgcgcgaccgggtgattgcgctggaggcgaagatcggcagcgtgaacacctccatcgtggcgctccacaagttgatggacgagtcgacgatcatcgtcgggatcgaacccaacgcaaaggggtacgagatcgagttgagcgacggaacccggctgcccgtcatcctcggtgagaagatcgaggcgctggttcccgtcatgggcatcgacgccgagggctactggaccgtgagcctcgacggcggagccacttccgagcggctgaaggtcggcggagagtacgtttcggcatggcccgtttcgggcggcgaccataagcccggcgccgagggcgtcaccccgcagctgaaggtttcggccgacggggagtggctcgtgagcctcgacggcggggcgacctacgcgccgcttttgcaaaacggacagccggtcaatgccttgggggataaagtcgtcgtcagttacagttcggctttcaagtcggtgacttacgacgcgacgaccggacttctggcggtcgaactgctcgacggcgaaaaactcacgcttcccgtcttcgacgatttcggactgacggtgacggcttccgacaacgagactttccgcctcggggagacccgggccttcgaggtcgtgcagaacaacgtcgccgaggcggtgatcgacgcgcctgcgggctggacggccgtgcttggcgagacgacgctgacggtcaaggctcccgcgacgttcgacgccgcttcgcagcaggcggcggtctcggtgacggtctattcggacaggaaataccggaaactcgtcacgctgaacgtgacgctgctcgacgagcaggtggatgccaacgccgctctggcatggcggaattttaaggccggaactgcggataacgtcctgctcgattattcgtatgccggttacaagcacggcgaggaggctccggccgatgtctggggactgggctacaaggtttacaacgtcgtcgactacggcgccgatcccacgggcgtcaggtcctcgcgcggggcgttggctgcgctgctcaaggagctgaaactttccggacggagcgatgcgggggcgaacctcgcgaatgccaatgcccgggcggtgatctacttccccgaggggcgtttcgtcctccacaacgacgacgacaacgtggtggacccaacctccgccaaccagaaatacaccgactcgaaggggaacaaccgcagcgaggagattttcatccgcgggggttatttcgtgctcaagggcgcgggccgcggcaagacgacgctcgtcatggacacgcccaacctgccgaacaactcggagcagatgtggtcgtcgcccatgatgatcaatatcaagcacaattcgggactttcggacctcacgacggtgacgggcgacgccgcacgcggcacgttctcggtggaggtggcttcggcggccggcatcgggaagggcgactgggtgtgcctttcgctttcgaacaacgacccgacgctggtggcgcaggagttggcgccgcaccgggtcgagggaaacatgaccgatattcagaccattacggtcgaggactatcaccaggtggcttccgtaagcggcaaccgcgtgaccttcgccgaaccgatcatgtacgccgtggaggccaaatggggctggaaaatccgcaaatacccccattatgaacatgtcggcgtcgaggacctcacgttcgagggccgctcgaaggagaacttcggccaccacgcttcgtgggaggacgacggggcctacaagccgctcaacatgatgcgtctgaccgattcgtggattcgccgcgtcgatttcagaggcgtcagcgaggcgttgtcgatcgtgtcgagcgccaactgctcggcctacgacatagagatcagcggcaaccgcggccactcgggcgtgcgctcgcagtcctcgtcgcgcatcttcatcggcaaggtctgcgaccgcagccgcgggcaggctgtctcgccgccctatacgagcacggggtatttcgaaaacgccggacagtaccacgcctcgggtgtgtcgaacacctcgctgggggccgtgctgtggaacaacacgtggggtgacgacgccttcttcgagtcgcattccaggcagccgcgcgccacgctcgtcgaccgctgcacgggcggattcgtgcaatggcgtttcggcggcgacgaaaccaacgtgcccaaccacctgggcgacctgacgatctggaatctgaacgccacgcgtgcggcgcacgatttcggggccgaaccgttcaagtggtggctctcctcggacaagtggtggaagaccatgccgccgatcatcgtcggattccacggcgcggcggtcaccttcgacgagagcgccgaacaggtgaaatacctcgaaagcaacggcgcggccgtcgagccgctgtcgctctacgaagcgcagctgcgccagcggttagggtatgtccccgcatggctcaattctttgaaatagaataaaaaaccaaacatattatgaaaaagtatctgatcctgatcttcgtcgcgctggctgcggttttccagtcgtgcgacaacaacgacgacctgtgggatgcgatcgacgacctgaagagccgcgtgcaggcgctcgaaacgcaggtcgacgcgctgaatggcaacatcgaggcgttgcagaaactctacggcggcgccacgatctccaaggtcgagacctccgatggcaaatatctcatcacgctgaccaacggcgagaccatcgaactggtgcagggcagcgaggccgaggccgtgattccgatcgtctcgatcaacgacaagggcgagtggcaggtgtcgatcgacaacggagccacgttcacctcgctcggcgtgaaggccgtggccgaggacggcacgacgccccggttccgcatcgacgaggccaccggttactggcaggtgagctacgacggcggcacctccttcgaaaatgtgaaggacaccaagggtcagcccgtcaaggccatcggctcgggtacggtgaccgacaagttcttcgaggaggtgaaggtcgacggcggcgacctctatatcaggctgctcggcggcgaggaactgcgcattccgatcgtgagcgatttcttctgccggatcgtcacgccgaccgagggcgtgcagacgttcgacgccggggccaccaagcgtttcgtggtggagatccgaggtgtcgagcaggtgaaactgtcggctcccgagggctggtcggcacgcctgaccgatgccgtggatgagagggccgaactgatcgtgacggcccccgcagccgtgacccgcgccacggccgacacttcgaaggacgtggcgatcgaggcctttgcggccggcgggctttcgacggtggccaaaatccaggtcgagagcaccggaacggctcccgccgctccgacggttgcggtgaccaactccgcgacggtcgaacccacgcagtcggcgctgaccttcgacgttgcgccctcggccaatgccgacggctggaaatacctctgcctcaaatcgacggaagcggctcccgacgccgccagggttcttgccgaaggcacggccggtgcgggtacgggcgtgacggtcgggaatctcgaagccaatacggcctatacgatctacgtggttgcctatgccggcgatctgacgagcgaggtggcaagcgtcgggaacacgacggcggcggcacccgttaccgcagagacggactactaccaggattatcaggacgggaaagacatcgcgctgggcgacctgacgatcaataagacggtctatccggaagcgcagctgctcaagccctccgaactgaccgctgccattctccagacgggcggcctgatctttgttgacaattccgacgagtcagcgctggcgcatacggtcaacggaacttcggtaaatgccggacagacgagtgctctcgtgctgatcggccgttacaaggagcgtgagcaggcggcgctgaccctacctgaaatgcgttgcaaccgtaatgtagccgtgatgaatctccacttgatcggaaacaccgacaacacctttacgacgaccaatgcgaagaacctgaatcccgatctgttgctggtggattgcacgctcgatgtaaagcgttatttcatctacgacaacaacggaaactggagctttaataacatattgattaataattcgtttgtgatgtatcctgtgggtgctaccaatcagccggccctgtattcgatcacgacgaccgccaaggccgggggctatccgatgcagagcatcaagctgacaaataacgtgctttatgcaaccgcgccaacgcaggcctatatcctgcaatgtggaaacaatgcgcagtatgatacgaagaacctccggattgagattacggggaatacgctctataacatttaccagccgaacattatgatccgtgcttatgttctggcggggcttacggtaactaaaaacgtcggttattacaccggagttactgccaagagctatctgacgggtgtgtatgacacggccggatttacggctgacaaggcggaggtaacctataattacctctacaccgcgccggtcagcgatacgaatttctggtcggcgaagcataccggaagctacacgcctgcaaacaaccagatgggcgacggcgtggaagctccgttctcttcgatggatgcggcgaaggggtatttcccggtcgacgcttcggtggtgaagacgggtgcgggagcgacctacgacacgaaggcgtggttcaaggcggagtaattccggcttgccgtaacgaaaaactccggcctgcattttcgcaggccggagtttttttcgttgagccgaagaggcggatcagccgatccagcttgtcagaatcttcatgccgccgtcgggcgtgaaggcgagcgaacgggccgaagccggaatcaggaccgtttcgccctggtgtaccggaaccgctgcgccgctgtcgtcggtgagcgtgccgcggccctcgatgcagatcgccacgacgaacgagtcgagcgacgcgaggtcgagcgtctcggggcgggtcagatcgtagagcgatgtggtgaaataagggcacgacaccagctccacgcgcgtgtcctgcgccggctcgtaatgcgtccggtaatcgggcagcacggtgtagtcgatggcgcccttcgccagttcggtgtgcagttcgcgggtgttgccgttggcatcgcggcggttgaaatcgtagatgcggtaggtgatgttcgaggtctgctggatttcggcgatgaacgaccccgcgccgatcgagtgcacacgtcccgcgggcaggaagaatacgtcgcccggtgcgatcttgtagtcggccaggatgtccgtgatggtgttgtctccgacgctggcctcgtactcggccggcgttacctgcttcgagaagcccgaacgcaggtgcgcgtccttatccgccgacaccacgtaccacatttcggtcttgcccttggatttgtggcgttcccatgccagctcatcgttcgggtgcacctggatcgagagatcctgccgggcgtcgatgaacttgatcagcagcgggaactcctcgccgaaacgcccgtagttggctttgcccaacagcgccgcgccgtggcgggcgatcagttccgggagcgatgtcccggcttcggggccttcggcgacgacggactcgttgtccttgacgcccgaaagctcccagctttcgccgatgttgcgctggtcggtggcgattcccttgtaaggggcgatcttctcgccgccccagatcagggatttcagaatcggttgaaatttatacatggtcgatctattttatgcgttttccgtgtcgagctggctcaaggcgaaagcgtatgctccgaccgaaatggcttggctcgcgccgagtttcgaaatggtcacgccgatgcgtttttgcgggtcgtaggccacgtagcggtccgtgccgtagactttcaggggccgctgcgcgcccttggcgaattcgcggaattcagtctcgtcgtccagatcgtaaaccttcatctgcacgcggttcaactcgttgccgttgagctggtgcatcttcgaacgcagctcgttcagcaggctgggcatgatccatttgcgggccgccgtgatgccgccgccgatgacgatcagtccgtccaccagcgtcacggccgtagccatggcgtcgccggcgatctcgcccatttcggcaaaagccttcttcgcggcctcgacatctcccgggcgttttccctcggcgatttcgcagatatctttcggttcgaaggtgtggttcacgtcgcccgaagcttcgccgtagacgcgtttcacggcacggatcgacgccccgtcctcgacgatgatttcgggcattttcttgtgacgcaggcagaacgtctcgacgcatgagttgtcgccgcggttcagccggttgtcgatcacaaggcccacgccgagtcccgtgccgaaggtgtagccgacgaggtttttgtatttcttcgggcttcccagcgcttcgagccgggcgttgacctcgggcagggcgcctcccagcgcctcgccgtaggcgaacaggtcgccgtcgttgttgatgtataccgggatgccgaatttcgcttcgaggaacggacccagcgccacgccttcgcggaacgacgggaagttgggcagataaccgccgatgatgccgttcggatagtcggccgggccggggaatgcgaaactgatggctacgggtttttcggacagacggtcgatgacggcctggaacccttcgaccatcgtcgcgaggcatttgtcgaggttctcggcatgcgacgggagggtgatcggctccacaatgaatttgttggcctgcatggcgccgaaaacgaggttcgtgccgccggcgtcgagggtgatgaccacccggttgtcatggctgtacatattgagtagttttgtttggattgccggtgttccggcaggcaaagatacataaaaattgaacgggtgcaaaaccgaattgcgcgaaaaaggccggcgactgctgccgccggcctttttcaggaccttgccttgtgtcagttgttttcgggacgcagcttgcgcacgacggcgccggtctgccacatctcgctttcgcgcatctcgcgcagctcctcgttgagcttctcgcggtagtcgggtttgctgttcaggtcgatcgaacgctgggcctcgttgccggcggccacctccctgtacagctcttcgaagacgggcttcgtggcgtcgcggaacttcttccaccagtccagcgcgccgcgctgggccgtggtcgaacagttggcgtacatccagtccatgccgttctccgagaccagcggcatgagcgactgggtcagctcctcgaccgtttcgttgaaggcctccgagggggtgtggccgttggcgcgcagcgtgtcgtactgggcggcgaagatgccctggatggcgcccatcagcgtgccgcgctcgcccgtgaggtcggagtaaacttcgcgcttgaagtcggtttcgaacaggtagcccgaacccacgccgatgcccagcgccacgacgcgttcgaaggcgcggcccgtggcgtcctggaacaccgcatagctcgaattgagtccgcggccttggaggaacatgcgccgcagcgaggttcccgagcctttcggggcgatcaggatcacgtccacgtcggccgggggcacgatgcccgtgcgctccttgtaggtaatgccgaagccgtgggagaaatagagggccttgcccggcgtgaggtgctttttgattgaaggccatacggcgatctgcccggcgtcggagagcaggtactggatgatcgtggcgcgctcggcggcctcctcgatgccaaaaagcgtctggcccggaacccagccgtcggctacggccttgtcccagctcgcggagccttcgcgctggcccacgatgaccctgaatccgttgtcgcgcaggttgagcgactgtccggggccttgcacgccgtagccgatgacggcgatggtctcgtccttgagtgtttcgagcgctttttccagaggaaattcctcgcgggttacgacgttctcttcgacgccgccgaaattgatctttgccatgattttcgtgattttgagtttgttatatgttctgaaagttatttttcgcttttgttcccttcttcatcggattcggcccttaaacggtcgatttcttcaaggtactcgttcagcagctcgcgccgcgacttgatgatggccaccgtgccgctgcgcacgaactgctgtacgccgtagggttgcagcaggcggaacaacgcctgcgtgtcggccttgtggccggttttctcgacgacgatgtagtcctcgtcgatctccagaatgcggacgttgtgttccctgacgagttgttcgacgccccggctgcgggtcaccttgtagagggcgatctcctgctgcacgacctcgtcgggggtgtagacgaaggtcttcagcacgtcgatcttcttctcgacctgccgcacgagtttgtcgacctgatcgggtgtggtgcggaccacgatggtgaatttgtggatgccctgcaacgccgattccgaggtcgtgaggctctcgatgttcacgtcgcggcaggtgaagacggtggtgatctggctcagcaggcccaccttgttctccgaaaacacggtgatgatgtattcctgttccatacgctgtttcgttttattcgaaccggatttccgataccggggcgcccgccgggaccatcgggaaaatgttctcttcgccctcgacgcgcacctccagcaggaaggcgccttcggaggccttcatggcggcgatggcctcgtcgagttcctcgcgccgttcgacgcagcggtacgaaaggccgttgccgcgggcgatcagcccgaaatcggggttgaccatctccgtaaaggagtagcggcggtcgtagaacagctcctgccattggcgtaccatgccgaggaacgagttgttcagcaggacgattttcacggggatcttcgactggaagatcgtgcccagctcctgaatggtcatttgcaggccgccgtcgccggcgaaaaggacgacttcgcggtcgggggcgcccagtttggccccgatggccgccggaagtccgaatcccatcgtgccgagaccgcccgaggtgaccacgctgcgcgtgcggcggaatccgaaatagcgcgcggcgttcatctgctgctggcccacgtcggtcaccagcaccgcgtcgttgcggtaggcccgggccacggcggcgaccgcctcgcccatgcggatacgcccttcggcggggtgcacggccttgcggatgacagcttcgtattcgatctggtcgcaggcgcggaatccggcgatccattggctgtgatcgcgtttgcggatacgctcggtgatgagcggcagggagcgtttcacatcgcccacgaccgccacgtcggccgggatgatcttgccgatctccgcggggtcgatctccaggtggatcaccttggcgttggcgccgaaatgcgcgggattccccgtcacgcggtcgtcgaaacgcatgcccacggccacgagcaggtcgcactcctgattcttgatgttgggaccgtagttgccgtgcatgcccagcatgcccacgttttgcggatggtcggtcggcagggccgagaggcccagcagggtcgaggcggcgggcatgccgctcttgtcgagcagcgcccgcagctcggcttcggcgttgcccaggatgacgccctgacccaccatgaccagcggacggcgggcctggtcgatcagccgtgcggcttcggcgatgcgttccccgtcgggtgcgggcgcggggaggtaactgcggatcgaggtgattttttcgtagcggaacggagctgttccgcattgtgcgtccttggtgatgtcgaccacgacgggacccggacggcccgagcgggcgatgtagaaggccttggcgatggccgcgggaatgtcctcggtgcgcttgacctggcagttccacttggtgacggcctgcgtgatgccgacgaaattggtctcctgaaaggcgtcggtgcccagcagcgcggagccgacctgtccggtgacgagcaccagcggcgtggagtccatcagcgcgtcggccagccccgtcacggtgttcgtggcgccgggacccgaggtcaccagacagaccccgacgcggccgctgacgcgggcatagccctgtgcggcgtgcacggcgccctgctcgtggcgcacgaggatgtgacgcaggcggtcgcggtagtcgtaaagcgcgtcgtagacggggatgatcgcgcctccgggatagccgaaaacggtttcgacgccctcttggagaaacgattcgatcagggccttcgatcccgtcatcgagggatcggaggccgcgcgtcgctcttcgggacggagtgtttgagaggtattcattgcgggtccgtttttttattcttcgttatcgtcgacgatacgtacggcgcccttgtcggccgagctgaccagccgggcataggcgcgcagcgacgccggaacgtggcggtcgcggccggcggggcggaagcgttcctgtgcggccatgcgggcggcgatctccgcgtcgtcgaccgcgaggcggatcgagcggccggggatgtcgatctcgatctcatcgcccgtgcggacgacggcgatctctccgcccgaggcggcttccggcgagacgtggccgatcgaaagccccgaggttccgcccgagaaacgcccgtcggtgatcagcgcgcaggccttgtcgaggtgtttcgacttgaggtacgacgtggggtagagcatctcctgcatgcccgggccgcccttggggccttcgtagcggatgacgaccacttcgcccggctgcacctcgtcggcgagaatgccgttcatggcctgctcctgcgattcgtaaacgcgcgccgggccgcggaagacgaacagtttttcgtccacgccggcggttttgacgacgcagccctgccgggcgatgttgcccgtcagcacggccagtccgccgtcgcggaaataggcgtgctccacgtcgcggatgcagcccgccgtgcgatcggtgtcgggttcttcgtagtaggagtgctgtgcgcccagctcgcggctgtaatggcctgccggggcgctgagcgcgcggcgtcgcgcggcgtcggcggctgccgggttgagaatgtcgcaggccgggatcgcttcgcccagcgtgcgcccgtcgacgcgcaggaccgaggtgtcgagcagtccggcacggtcaagctcgcccagaatggcgaagatgcctccggcgcggttgacgtcctggatgtggtagtgcgagttgggggcgaccttgcagagcaccgggacccggcgcgaaaggcggtcgatgtcctgcatcgtgaaatcgacgccggcctcgtgggccacggccagcaggtgcaggaccgtgttggtcgagccgcccatggcgatgtctaacgacatggcgttttcgaaggcggccttcgtggcgatcgaacgcggaagcacccgctcgtcgccctcgaagtagtaacgttcggcattgcggacgatgagcgccgctgcgtcctcgaacagccggcggcgattgacgtgggtggcgacgatcgtgccgttgcccggcagcgagagacccagcgcctcggtcagacagttcatcgagttggccgtgaacatgcccgagcacgatccgcagccggggcaggcgcagcgctcgatctcggcgatctgcgcgtcgctgcacgtctcgtcggcccccatcaccatggcgtcgatcaggtcgacgctgcggccctgaaattttccggcctccatcggcccgcccgagacgaagaccgtcgggatgttgagccgcatggcggccatcagcatgccgggggtgatcttgtcgcagttcgaaatgcagaccagcgcgtcgatcttgtgggcggaggccatgtactcgacgctgtcggcgatgatctcgcgcgaaggcagcgagtagagcatgccgtcgtggcccatggcgatgccgtcgtcgacggcgatggtgttgaactccgcggcgaagcacccgagggcttcgatgcgctgtttgacatattgtccgatttcgtgcaggtgtacgtgccccggcacgagttgggtgaacgaattggcgatgccgatgaccggccggccgaactgttcttcgcgcatgccgttggcgcgccagaggcttctggctcccgccatccggcggcccgtcgtggtgacggcgcttttgagtgtgtgtttcatctttccgttttcgtttcagtctcctgccgggtccggtcctgtaacaaaaaaacctttccccggtgggagaaaggctttattttcaatcaactatgcacaccacctttctcccgttatctccgaaggacgacgagcagcagggtaatgacgtgaatattcgaatgattcagggcgttcatagccggttttccgtgtttgttcgttttctgcgacagtgcatccgcgtgcaggccgggtctccccgttatgccggatgctttctgtctgactatggcaaagatatgaatattgaatcagttgaacaaataatttcctaaaaaaatttaatattgtaacagtccggaagcatattctttcctgaagttcgcaactgtgcgtgacggctcgtgtttgcttacaatttgaaaccggcattttggcctccggatgcggttcccgggcgttttcttcccgcggtccggcgggtgtgggccgaaaggctttcatttttatttccgaaatctctgttgcggcccttttgcgctgctcctatataaataaaaggccgtctgcgcaacggcgggccacttacaaattgttacatggatttggattattaaaatatttgttttatatttgccgacgatggttaccaaacggcataacacgacgacagggcgaggttgcggatttatcggcaatcccgtaggttgtgtttataccgctctcttcacgaccgccacaactgccacgacgactgccacgacccccgtgggggttcagtagtcaatattccgtccgcatacctgcgtgtgcacatcccggccaaggctgccggagcggaaacagaaaatcaggcaaaggtagttcaattcatcaaaaaaaattggtatgaaacatattaaggttttcgcgccgggaacggtcgcgaatctggggtgcggtttcgatgtgatgggccttacgctcgacggcgtgggcgacgtgctggaagtgggcgttgcggaaaatgccgaaggattcgaaatccgtaaccgcagcgggatggaactccccggaaatgtcgaagaaaacgtcatcacgcccgccgtacgggccttgctcgaagcttacggccgtccggtgcggatcgaggtggagatcctcgaaaagatcgctcccggcagcggcatcgggtcgagcgccgcctcgtcggccgccgccgtctacggggtcaacgaactgctgggccgcccgttctcgggcaagcagctggtggagttcgccatgatgggcgaggcgttgctgggcggcacgccccatgccgacaatgtaggccccgcgctgttgggcggcgtggtgctggtccgcggctaccggccgttcgacatcgtgcggctgcccgtgcccgacaactttttctacgccgtggcgcatcccggcatcgtggtcagcacccgggaggcgcgcgaggcgcttccgaagcggattcccctgtcggatgccgttgcgcagtggggcaacgtcggcggactggtcgccgggttcgcgctgcgcgacgtggcgctgatcggccgttcgatgcacgacgtcgtggcggagccgtaccgcaagggattcatccccgggtacgacgcgctgaaggagcaggtgctggccggaggcgcgctggccatgaacatcgccggatcgggaccctcggttttcgcgctggcctccaattacgaggctgccgtgcggatctccggggagatgaagcggcatttcgaagggctgggaatcggttgtaatagctatgcgggccgcgtgtcgaatgccggggcgcgggttgtcgaataacaaaagcgaaggacgatgaattattacagtacgagagatcgggaacgggcgcacggctgttcgctgcgcgaggccgcgatgatggggctggcccccgacggggggctgttcgtccccgaacggattccgcaggccgacatggcccttgcggagcgtctggccggcgaatcctacgccgcgttggcgggttatctggcggggttgttcttcggcggcgatttcgattcgcaggccgtgcagcgtgaactggacggcctttacgacttccccgtgcccctgcgcgtggtcggccggggatgctatacgctggaactgttccacggtccgacctgcgccttcaaggatttcggcgccgggttcatgggccggatgacaggcctgctgggcgccgccgatgaaaaactggtgattctcacggccacctcgggcgatacgggcagcgccgtggcgcacgggtttcacaatgtgccgggcgtcgaggtcgtggtgctctatcccgaagggaagatcagccgcctgcaggagtgccagatgaccgccctgggcggcaacatccatccgctgcgcgtcgccggaacgttcgacgattgccagcggctcgtgaaggagctgttcgccgacgccccgttccgcaagcagcggcgggtgacgtcggccaattcgatcaacctgctgcgctggattccgcaggcgttctactatttctacggttattgccagtggcggcaggccacgggcggcgaccgtcccgtcgtcgtcgtgccgagcggcaattacggaaacctcgccgccggaatgctggcccggcgcatgggactgcccctcgggggcttcgtcgccgcctcgaacgtcaacgatgtcgtgcccgagttcatccgcacgggcgtctaccgcccgaggccgtcggtgcggactccggccaatgcgatggatgtcggcgcaccgagcaatttcgaacggatgctgtggctctgcgacggcgatccggagatgctgcgcgccgaactggagggattccgctgcgacgatgcctcgatccgccgcacgatcgacgagctgtatgagcgccacggctatttctccgatccgcacagcgccgtcggctatgcggcctcggcggccgtggacaagccgggtttttacctctccacggcgcatcccgccaagttcggagaggtcatcgaatcggtgaccggatcgcgggtgccgcttccggagcggctcgaacggctgacgcggcggccgcaatgctccgaaccgctggcggtcgatcttgccgccctcgaagagttcgtggcgaacgtctgaatgtgaaaatcctccgcccgatcgggcggaggattctttcttttgttgtgttttcggttgtgtttttggttgcttttgtttatatttgttgcggaaaaagcaaataaatccgatactaacgtaaaaaaaacttccgatgaacctcaaacgtctgctccctttgctgatcgttccgctgctgctgacggcctgcccgtcgggcgccaaccggacgaaaaacggtcccgatctgcgtaatctgccgcgcgaaatccgctcgggcgaacaaggtccgttccacgtgcagggcattgccgtcgatctcgaacgcggctacatctatttctccttcacgaccaaactgctgaagatggacttcgaaggcaatctgataggcagcgtggacggcatgacgggccatctgggctgcctgacgatgaatcctgccgacggccgcgtttacggctcgctggaatacaaggacgatgcgatcggcaagggcatccgccggacgctcgacgccgggcaggtggcgcctgaagacgaaaaggaccggacgggattctacgtcgccattttcgacgtggaccgcatcacgcgtccggacatggatgccgaaaaggatcgtgtgatgaccacggtctatatcaaggaggccgtcgacgactatttcgcaatggcggagaacggcggacggacggtcgagcaccggttcggctgttcgggcatcgacggcgtgactttcgcgccccggttcggagcgaaggagggcggcgattatctctatgtggcctacggcgtttacggcgacaccctgcgcacggacaacgattaccaggtgctgctcgcctacgacacgaagggctggaagcgtttcgagcagccgctctcgcaggggagtctgcataaaagcggccctgcggcgcccgatcacaagtatttcgtccgcacgggcaatacctcgtggggaattcagaacctggcctatgatcccgcgtcgggaaactgctatgccgcggtttacaaaggtaaaaaatcccagtaccccaattattcgctctttgtgatcgacggcggcaaaccggctcgcagggagcttttgcagggattcgatacgcctaccgagggtgaggtgctctcgctggttcccgccgggaaatcggccggcggcatctacggctgggatttcaaatggggaacgacgggactgtgtccgctcggcggcggctatttctacatttcgcaaaacgcccgttcgaaggagaccaaacagcagagcagcaccgttcgcctctatcggtggaccggcgatgcggatgcccccttccggccggtcgaatagcccctctccggttgtgccatgcgcccggccgctcgcaggagcggccgggcgtcttcttgtcggctgcatgaggggcagccagcgaatgctgcggggtaagcctgcatgttgccgggttatccccggctttccatgctgtcgaccgacgggttgaccatcaccacgtcctgttccagctgccgttctgtgggcgtcccgtccccggttgcaggtgtgatcggacctccgtcgttgagaatgtcgtcgggggtgacttgcgttacggtgatttcctgcgtcggttccggctgccgggcggcggtttgttccgcccctgttctatcggtatgtttcatggctccctttttggacgggagccttgcaaaggccataccgtttccggtgatggcgggcgcctttacggttccgggttcccgaagtcgaaccgcagctgcacgcactccgggcaggcctccggcgagttgccgaccgtaaggccgatcagccggattttacgcccgtggaaatccgccgcggccagcagttcttccgacacgcgccggagggtctctgccgaatcgacgggcgtgaatagggttttcgaccgggttatctgccggaagttgtcgaacttgagcttcaggacgacggtcttgccccgaaattcatgccgcatcacccggttccagacctcctcgcgcacggccgacagttcgagccgcagccgttcccggtcgtccgtgtcttcggcaaaggtcgtttcggctccgagcgacttgcggacccggttcggcgtgacctcccgttcgtcgatgccccgggcatagccgtaatagctgtgtccggccttcccgaactgctgcacgagtgccgcttcgttccagagccgcaggtcggctcccgtacggatgccgaggcggtgcatcttttcggccgtcacttcgccgatgccgaaaaagcgttcgacgggcagtccggctacgaactcctcgatccgctccggcgggatcgtgaacagtccgtcgggtttccgatagtcggaggcgatctttgccagcatcttgttgaccgagattccggccgaggccgtcagtccggtttcggcgaggatgcgggctttgatttcgcgggcgaccagcgtcgccgaacggacgtggctcacgtcgagaaacgcttcgtcgagcgagagaggctccacgagttcggtgtattcgccgaagatggcgcggatctgtcgggaaacggctttgtagacatcgaaccgtgccgggacgaagatcagttccgggcacagccgcttcgccagcacggacgagagggccgaatgaatcccataggggcgggcttcgtagcttgccgtggcgacgaccccgcgcggtccgtcatatccgacggcgatcggacagccccggtattcggggcggtcgcgctgctctacggatgcgtaaaaggcatccatgtcgatatggataatcttgcgttgggacatcgggcgtttgtcggacggacgcaaagataatgcaaattatttcttttttgccggtcgaatccggcgtttcataccggcaggttgaggcccggttggctgccggcgcgtattggcggttgaaaatctcttccggattgagggaatgcgaacggattgcgtatctttgtcctcgtttatatatccaatgaaaaatggcagatgattatttaggccgaaaaatggaagagtacctggcccgttcggcatccggccaggccagtcgccggccgctggtaacattgagccggctgttgctgaaaaaccgcagccatcgcggctacgatccccgcttcatcgtgcgcgaagaccagcttcgccgcattatcggggtcaatacccgcattccctcggcgcggaatcagcaggtcctgcgattccggcccgtcctggcggacgaagcgcccggggtcttggccgaaatccgcctcggaggggccttgcccgagcttcatttaccgcttccgggaaccgggccgaacgctttcatcatcgtctgctcgacggttccggaagatcgttatgtcgatattgatttgggtatttcggttcagagcatgctgctccaggcggctgaaatcggactgaacggcatctgtatcggcgcgtttgacaaagagcggatccggcagaaattccatctggagtccgagccgctgctgatcctggccatcggcaaaggcatcgagaaaatcgaattggtggagatttccgaaaacgacgatcaccgttatttccgcaaggacggcatacactatgtccctaaagtccgtgtggaagatctgattatcgggtaagtcggattttacgccgcccgccgctcctcccttcggggcggcccgctgaacagcgcagattccttattgtgggtgaacggggtgttggtttccgaggacggataaatgcgccggagacctcctcggagtcgttcccgccgtgctgttattctttttctgcccgaatgtcgcggcctccgatgtccgaatctcctgcgtcagccgagttcggcaaggatctgccgcacgacgctctcgtcggcatcggtcagggtgtattcgggaacaccggcgcacccgcccatcgagacctgcggattgcggaagcgcatgccgctttcgcgttcccggcgggcgctgaaatgcagggcgtcgacccctgtggcggccagcagtcgggcgttcgacggaccgacgccgctcccggccatgacttcgatgcgtccggccgcctgcgccgccagcgcacgcagcgtttcgatgccctcctgcgccgtgttgcggcctccggaggtgagcacccggcggcatccggtgcggatgaccgcttcgagcgcctgccgggaatcgcgcgtcatgtcgaacgcccggtgaaacgtcacctccatcccctcggcctcgcgcacgagctgcgccgtgcgcgtctcgtccacctctccgtcgggtgtcagcagcccgaaaaccaccccgtcggctccgtattcacggacgaggcggatctcttcggccatcagcgccacctcgtcgtcggtgtagagaaaatctccgccccgggggcgtatcatcacgctcagccgcaggcccggcaggctccgggcatagcggatcagtccggcggaaggggtcgtgccgccttcgaggggagcggcgcagagttcgatgcgctcaacgcccgtccgccgggcgatgtcgcatgcattgcgggtataggtgcagagttcggtcgtcatcatccggttataattggtgtatggtgtgcaggaaacggtcgcccaggccgatcgtgtaaccgtgcgattcgaacacgacgcggttgaacgtgtcgccgattagaaagaccggaagcggaacgttccccggcagatgcatcgcgtcgaggatctgtctgcggacggagccgtcgcggtcgatgccgaacgtgacggtttgcggaagcggtgcggcgggtgacgccgcgtatttcgcgtatgccgtttcatcggggaagagcaggatgatcgaacggccccattgctccagttcggcggccttggcggcgatgtccttcagcgcatgatcggtgggttcctgcccgacgccgaccagtccgaccacgaaatagccgcgtcccgcggtgagcagcaccgaggtctcccggccggtccgggcgtcgatgaatttcgattcggagttgaaattgccgatcacgcggaccgcttccgagttgtcgcgcatcggcagatcggtttcggtcgtccggttcggcccgatgttgaggaacgacacgtttgccagaacgctgccgtcggcaagccggctgcccgttgcgagcatgtagtagccggtttccaggtcggtgggtgtgtcgaagcgcgcgctccatggctcgaaatcggggtagttcagcagcgcgaacgactgcccgtcgaagcgcgagagcgtgaagtgtctgaaatattccggatcgtcgagacgcggaatcggctcgtagcgcagtttcagccggccggtttccatctgccggtcgttcgccgactcgaaatcgacgggcacatcctttccggcgtggcggtagaagaggttgccggtcacggggtcgatccacgccgggatgccgagcgaacgggccgcggccacgaagaagatagcccgcgagggcttgtcggccgtccggctgcgccacacgccttcgggcgagatggtcgtggagacggtgcagagttcgggccgcagcgtcaggctgtcgcggcaccacgctgcgagcagctgcggatcgttgcggaatgccgcggcatcggtcgccgggatttcacgccggagaaacgaccggtaggcggtgagcatctcgttggccgcacgcggagccagcacggtcgcggcgtcggcatccttgtccgtattataaagatggtctgcgagcaccgccgacggcgtgtcgcgcaggtccttttccgacagcgtggcgagcagttgcagggcacgtccggcatattctttccggctcgcttcgcgcaggaaatccatgatctcgccgtggttgcctcgcgatgcggttatgaaccgggcgatctggccgggcttcactccgatggcgcgggcgaacgaatcgacggccgattgtgcggggaacgtggcgatataggcgttgcggatggagtcttcgcggttgaagcggcggtcgttttccgcgcgctgggcggccgtcacctccggcaaattcgcgctctcggccgggggaacgatgtcgacgggaaaggaaaattcgtcgccgatcgcgtgatccagcgccaccgtcgcctgcggctcccgcccgaaagagaccttccggatgccgaaccgcccgtcgcggacggccgtgacgagcatgtcgcccagtcctgccgacagcgacgcctgtccccggccgtcggtcgttttgcgcgacacggtgaagaactcggcgtaattgtaaagtttgaactccacggtcgcaccctccacgggactgcccgccgtgtcggtgaccgtcacggtgagcggagcgcatgcggcatagttcgaaatcacgttgatttcggtgtagttggccgtggttttcatcacctcctccgggccgtcgtaataaccgaagaccttggtgtgcatcagcatcccgcggctggccggggcgttgaaccaccccaggtcgagcaccggttccggctcgcaggccccgaggaaatgccaccgtccgtcggcccaggcctcgacccaggcgtggttgtcgtcggtgtgcgcccagcggggcgtgtagacctgccgggccgggatgcccaccgagcgcagcgcagcgacgagcagcgtcgactcctcgccgcagcggccgtgggccgtgcgcacggtggccagcggcgaactggtccgcgcatccgacggctggtagttggccttttcgtgacaccagtggttcacttcgaggatggcgtcgtacatcggcaacccttcgacgcgcggcgccagctggtcgtggaacacccggcgcgaatcgtcgaggttctcgttgttcacccgcacgggcagcacgaaatgccggaacagttcgtcggaaacgatgtctccccacggcatttcccggcaggtggccagcgcgctgcgcacgttttccagataaaaatcgcccgggtagtcggtcatgtcccccacgggcatataggcataaaggaacatcatggcctcgcgctcctgccgcgtcatcggttcgtcgaatatcccgaacagatcgccccggggaagcagttcctgtttgtggcggaaatcggtctccacgcgccgcatgaaaccctcgttgccggccggggagcacgccgacaacacgcccgtgagcataagcaggccggcgaatagctgtgtcgtttttttcatcgtaaagtgagttctatgattcggtcggtatcctcgggaacatgctccagattcaggacgatcccttttccccggagcgtgtcgaacttcacccgctcgccgttgttcaggcaccgggcttccccgactttttccgcaagcggcaggtacagcgcatcgtcctgcaaatcgagcacatgcacatagagtttgtcgcccttgcgcgtcgttacgccccagtcgtggggcgggatgtcgccgccgcgggttccgtagatgctttcgccgtaccgggcgagccattcgcccatctcccgcagccgttcgacggccgtcgcaggcagttttccgtcgggttggggaccgatgttgagcagcaggttcccgttgcggcccgcagcccgcacgaggtagtggatcagcgtcttcgacgatttgtaatcgaggtcggtgatcttgtagccccacatgccgttcatcgtctggcacgtttcgagcggcaggcggccgatctcctgccccgaaagcccggcggtgttctcgcccggaaggtcgcgctcgaaaatctggatgtcctcgccttcgaacggaacgaggtggtggttgttacccaccagacaggccggccggatggcatgtatatggtcgtacagcccgcggagtttccagtcgaaatccgggttccggtcctggtcccacaccccgtcgaaccagatggcgccgaccgggccgtagcccgtcagcagctccgtgagctggcgtttcataaagtcgtagtaacgctcgtagctgatcgccgtgccggggcggcccgttcccagtccggtcctgccgcgcgggcagtcgtcgcggtaccagtcgatcagcgaataatagaggtgcagccggatgtcctggcgggcgcactcgtcggagagcgcctttacaatatcctgtttatacggcgtggcgtccacgatgtcgtaatccgtctgcgcggtgtcccacatcgagaagccgtcgtggtggcgcgtcgtgaaacagacgtaccctgcccccgaggatttgatggccgagacccactccgccgcgtcgaaatcgtgtggatagaacgcgttggccagcttggcgtactcctgataattgatattgcggttggtcatcgtccattcgcccgtgccgagcatggagtaaagtccccagtggaggaaaatgccgaatttggcgtcctgaaacgccgtccgggcttgcaggttttcaggcgccggggcatagggcgcagtcgtctgcgcggaggccgtccagcaaacggcggcgcaggccgcaacgatccagcggtttttcatcgtatttggttcggattatatactttattcaaaagtaatacaaattcgcgacaatcatgccgctttttcccgttttttcttttcgtttgttacaatcggagctttttaacgtcgaaaaagttactttttattgcgatgttcgggcgcaactgtcgggcttacgatcttccttccgcccttcgctcccccggaagcaaaatcgcaggctcggatcgcatgtttcgagagaggccgctctggggctttcctatgcgctggccaagggcaaacacttcacgcgcgaggagtttgtttcgatgctgctcacctcggtgaacgacatcgactcgcggtttgaagggtccaaaacctccggcgggacgatcaatctcgaaaaataccgcggcaaaatgggtacgggtttgaccgatgcctaccagttgctgatgcagatcgaaggaacgccctgtctgaaagtcaagaccggcaaactggagcttgtcacccttacgaaacatttcggaggttcggccaaggatctgacctatatgggtgtcgaagtctcggcggaagatatgcagaaactcggcatggccgtggaaccgaagatgtacaacggtcagttgatgatcaaatgtacgaagccgggagttgcgcacatcaccgtgaaggcggtgggcggcggcaacaggcccggaacaggatcggttatgggcggcatcgaaattaccaagacgtttgccgtcattgcccgcgaaacgggtgctgaaaacggaggctggttataaacgatagagttaaaatacaatgaaaaaatatatttattccctgtttgcggctgttttgttcctgttttcagccggttgttcgaaggatgacgacggctcgaaaaacattgattcgggcgttgtgggcgagtggcgccagacgaagtggagcaacgaggcatatgcggatttcgatgtctacgtcgagttcctgtccgacgggacgttcaacatcttccagaaggtggaaactccgacctttgtgtgttattccggcgattttgcggtcaacggtgcgcagctttcgggccgttaccgcgacggtgagccttggggcgccagctacgcctttgagttgagcggagacggaaaaacgctgacgatgatcagccagaccgataaggccgaggagagcgtctatacgagaactgccattcccgaagaggtgcggaacgctcccgaagtgcgctccgcgctttccggtgcgttgctgcggattttctaatacgacgacgttgaagtccaaaagcagcctgaccatatggtcaggctgcttttgcgttgattctgatgggtgcgaaaaaggggacacaggcctccatgacaacgaatacacaaacattgcaaaatggcgtattgggtggctatactattgtttacattgccctctttacgcaggaacagttcaaaatcacgcaggaacgctaaatctatttcatcgaaccgagtgttcagcgacctaaattcagacaggcgggagagtagggaacggtgcttggatgccgagccgtatttgccgagcgtttcaagtctttctattgtttgttttagatattcgcctatggaacaattcagtcgtttgctgttctgttcaaagagattttcaaaggttacgggaatatccataatctctaaacgtcggattttcttctcgtactcttttactttggctgttatctgaaactgaatattgtccctgtcggggcagtcgtccgtgaccttttgtgcttctgcgtcccaatgtttaagcgcaacggaaacacccaatccgactgtctttttgcgtttgccttgaaagaataaaaggcacaatggagaggtggaatttttataaataatttctttgcggcatataactttgaatgtcatttgattacattgttatatgcagttgggtgtgtagttctctatgtggagcctaatgtgtaccctgcaccctcaaacgggctgtttttgccctaaaaatgccaaagagaaaggaatagtataaacgcaaaaaaaagaccgataatcattgattatcagtcttttgctttgtaccccctcaggggctcgaaccctggaccccaacattaagagtgtcgtgctctaccaactgagctaaagaggcatcaatcattatctgattgcgagtgcaaaggtagctataatttttatatctccaaaaattttgccggaaaaattttgaaaaatttctgcttttccggcctccggggttattccatcgccagtttgtcgctgtcccattcgccgccggcgtccgggtagatgaaaggccgcgaatcgccgaaacgcttcatattcaaataactttcataaaggttgatgccgttcgccgactgcgtggccagcgcgaaggccactaccgacggatggcgcttcgtggtgtggtaactgttctccgtgcgttcgaggtatgccggctgccattcggggtcgttggacggattcccgcccttgcggcgcgactccccgctgcggcgggtgtcgatcggcgcctgcgcaatcacgtagaggccctgcacgtcgcaaaagttcagcagcgattcgggcacaggccccggcagcagttttagcgtgttgaatccctgctcgcgcagcgccgcgatttcgttttcggtgatcgccgcggggacttcgcgtacgcgtagcgtcacggggcgtgtgttcagcgacatccgcccgtcctgcatctccaccgagcggaagccgaggcggagttccagatattcgacgtagcggccttcgtgctgggttttgagccgcagcgtgtactgcgtggggagttcggcgctccacagcaagttggcgggaatacgggccaggaaccgcagcgtgtcttcgcggcgcatgtcgagggtgacgtctttctgtcccgctgcggcattttcgcccgtcggcgtgagcagctggtagtggatgcgcgaggtgcgcgggttgagggcctcgcttttcaccgcgacggcgatctccgccgtggcgttgccgtcttcgcccatgcgggttctggtcacgacgtcacgcacgcgcagcgtgggctggctcatcagccaggctccgccgatggcgggcgccggagcctctttccagctttcgagcggtgcgacggacgacggctgcgcgaggatgacttcgagcatgttgcggccctctttggcctgtttggtgatgttgatttccgccgggttgttgccgtcggcgttgcaggccacgggaaggccgttcacgcgcacttcgtagtcgcccgacgcccatcccaggtggaacagcacctgccggttggcccatgcgaacggcacggtgaacggtgtcgagaaaacgttgtccttgaggttccattccgtcagacgcgtgaagtagcggttgtcgccgccgtcggccgccgtggccgcttcggccgaaggataggcgagtatctcgccgcgcggcaattcgcgtccgtaagtcggtgtgtactcctgcgcgcaaagtccgcagagggaaaaaagcgctatggtcgaaaggatagtccgcataagttcgtatatttgtcctccgtaaagatacagaaatttttcgatactgcgatgtccgggctgcccaaactcaattttcctgccatccggctgcgtgcgcgccgccgcggcgccggcgtggaggtctgggattccctgcgtggcatttatctcgtgctgacgcccgaggagtgggtccgccagcatctgatcgcttacctgacggcgtattgcggcgtgcagcccaaacgcatcgtccaggagtatgccgtggcgctcaacggccagccccagcgggccgacgtggtggtcgtgggcgaccgggccgagccgctgctcctggccgagtgcaaggccccgtgtatcccgatcaacagccggacgctcgcgcaggccgtgcgctacaattcggtgctgggggcgcgctacgtcattctgaccaacggcctgcggcattactgctgcgaatgccgcgacggggagtatgtccagctcggcggcttcccggatctttccggtgattgaccgtccgttttccccagccgtttccccgtccgtttccctgtactcggcggtacctgatctccgcccggccggatcgctacaaatttcggaaattcttgtcgatatatccctggaaggcttccttgtaattctcgccgatcggtacgtactccgtgtcgttgaggaagatgcgccctttgacgtaggccttgatcgtgcgcaggttgacgatgtacgaacggtgcacgcgcatgaacgactccgaaggaagcgccgtctccatgttcttgagccggaacagcgtggtgatggtcgttccgtcggcgaggtgcatgcgcacgtattcgccttcgctttcgagatagacgatgtcgctgatcttcaccagcgaaaccttgtaatcggccttcaccgagatgtactccttgtctttgggcagcgcctcggattccccctcctgcgccgggcgctggttgtggcggagttcgtagagcgaattggccttggccgccgaacggctgaaatcggcgaagctgaacggtttgagcaggtagtccaccgcgtcgagcttgaatccctcgacggcgtactccgaataggccgtggtgaaaatcaccatcgggcggtcgatcagcgcgcggacgaaatccacgccgttgaggtcgggcatgttgatgtcgacgaaaatcaggtccaccttctctcccgcgagcatctgctgcgcttccagggcgttgttgtattttgcgacgaggtccagatagggaattttcgagatgtagcttgtcagctgacgcagagccagcggctcgtcgtcgatggcgatacatttaagcattgagcgtcgggattacgagttttacggtataggtcttctcctcctcgcggatttccagcgagtagttcttcgcgccgtagatcagttcgaggcgtttgcggacgttctccagtccgattcccgcggggtgtttgctgctctgggcggcgtggcggctgttggtgagcgtgctggtcacctgcccgtcggcgtattcgatcttcaggcggatgaacgacggatggttgtagcttacgccgtgtttgaaggcgttttcgacgaagacgatcagcagcagcggcgggatcgacagttgttcgggcaggttgccgggcgactccacgctgatattcacggcgtcggtgtaacgaatgcgcatcagttcgatgtagtttttcaggaactggatgtcgcggttgagcgaaatgatctcgcgccccgactcgtagagcacgtaacgcatcatcttcgaaagctcgatcacggcgttcttggccgactcggtgtcgatgtcgatcagcgcgtggatgttgttgagcgtgttcataaagaagtgcgggttgatctggtatttcaggtaatccatttcggcctgaaggttctggcgcttgagcgcctccatctgctgttcgtcgcgcatcgactggtatatcagcttgatacccgtgttggctccggtcataaagaatcccagcaccacgttccagtacatctccagattggagaacgacgctttgcggtaggcgtcgagcgcttcgggatcgttttgtttgaggaggtggtccgtgaggtggtcctcgtagatctgcaccagccagaagacgctgatgatcagcgccaggttgctcgcgaggtatttcccgtattttcgccggagcatgtagcgcggggcgatgatggcattgtggatgagaaagatgaccagatagggggcgatatacctccaggcagtcagcacgttttccaggttgacgtgcatttcggacatcatctgcgagttgaggaccgggaccaggatgatggccgtccagaccatcacgtagagcaggttttcaccgatagcttgttttttctggattttcatgcttcaaatatagtgaaagtcgcgggcatagccaaacttgtttgagctttgccgcgacgcatcgagctttgcccgcaatgcgccgattcaaaaaacacccggctcttcggaagccgggtgtgaaagaaagcaggtaaccgtactaattagtgacgcctcattgttagaatggattcagtgactatgaagaattttgggatagagaatccaattggttacctgcctgtgccttatttgttcaacagcgagggttcgtacagatagcgtttgatgcttcgtttcggggttttttcgaactcgttggggtagagtgcgatgcccgagatccgctcgtaggcggccagctgcgcgttgagttcctgaaggttgttctgcatgatctgcggcaggtcggccttgtccacgccctcggcctcggcctgttcgtagtcggggaccacgagggccttgatcttgccgtttccggcgtcgagcaccagcgattcgagcacgaggtacatgttgttgagcttgtcctcgatctcctcgggatagatgttctggccgttgcccgagaggatcatggttttcgaacggccgcggatgtagagcgtgccgtcggggtccatcgtgcccatgtcgcccgtatggagccatccctcctcgtcgaggaccttgtgggtgtccttgtcgtttttgtagtatcccttcatgacgtgctcgccgcggacgaggatttcgccggccacgcgctgcgggtcttccgagtcgatcctcacttcgagcagccctttcaggaaccggccgcacgaaccggccttgaactcgttgtcgggggtgaagctgatcagcggggcgcattcggtcatgccgtagccgatcgtgatcgggaacttgatcttcatcaggaacgattcggtctcctggttcatcggcgcgccgccgacgatgaagattccgacgttgccgccgaaggcgtccatcagtttcttgcggatcaccgagtagatggccgaattgagcagcggaatcttcatggcgatcgacatggggcctttctccagcatcgggagcacctgcttgcggtagactttttcgaggatcatcggcacgcagcagatgatcgtgggtttcacgacggccatcgcttccagcaggattttcgccgccggaatcttgcccagcagggtgatgtgtccgccgacggccagcggcgcgaggaagtcgaacgcgcagccgtaggcgtgggccagcggcaggaacgacagcgtgcggcctcctttctggaagtaccgctgtccggtctgggtgttgattgtcgttgcggcgaacatcacgttgctcgtgaggttgttcaccgtgagcatcacgcctttcgagtagccggtcgttcccgaggtgtagttgagcaggacgacctggtcgttggggatttcgggatatttgatgtcgttgacgctgaatccgcgcggatacttggtgcggtagttcttcacgatgtcgcgctgaaacttggtgagcgacttgccgtcgcgctcgtagatcgcgtggaagtccgtgagcgagaatacggcttcgatctgcttgatctggtcctcctcgatcacgtcccagaagttgtcgcccaggaacagcaggcggctttccgagtggttgatgatatggatgatgtccgcaggggtgaaatcctgaaggatcggcacgatcactgctccgtaggtgatggttcccatgtaggtgatgcaccagcgtgggttgttgcggccgatgagcgcgattttgtcgccttgcttgatcccggctttcttgaaaagcaggtggattttcgcaatctccttggccatttcatagtacgaaaaggtctcgcccttgaaatagtcggtcaacgccgacatctcccgattctcccgaaaactcgtttcgtatattttcagcaggttttcctgtaacatgacgcttgctttaggtctttattgcggcgcaaagataacgtaaaaatttattttgccgtatgccggccgcaggatttatccttttatgtggataatttcgtcgaaaagtccggagccggttattcccgatcgtgctctttgccgctctttttccgctcctcgtcgtcgagtttcacgcgccgcggcttccagatgaaggtcttcgactcggttcccgccttcagccgttcgatgttcttgcggtgggtgtagatcagcaggatggcgatcacgaacgagaacaccacgaaagccgtcgatccgttgactttgggcgatatgagggtgaagacggggaagcagcatccggcgaccatcgaggccagcgacacgtagtgcgagaccatcagtatcaccagccacacgccgaagcacagcagcgccacggggggatagatgcccgtcacggcgcccacgagcgtcgcgacgccctttccgccgcggaatccggcgaaaatcgggaagatatggcccagcacggcggcgaacacggcgacgatcttgaggtttatcaggtcgttctgcccgatcaggtcgtcgtactgcatcagttcgatgatcgtcacggccacgaatcctttcaggaaatcgagcgcgaagaccggcagggcggcccgccggcccagcacgcggagcatgttggtcgttccggcgttcttcgagccgtgctcgcggatgtcgatgccgtaatatttcttgccgatccatacggcgcttggaatcgagccgagcagataggcgatgataatcatggtggtagccgtatatatcgtcagaatcatctttattcgcgtgttaacttgttcatgcaaatatagtcaaaaaatccgtatgtggaagtcgggggcgaaaaaaccgccgccgtatcccgcatttccggagaatttagtatctttgcattctaaatgaattaatgtatgaacacaaaggctttgctcgaaccgatgggctcgtgggcgtggtggcgctcgtggtttctgattttcctcggctgctcggtcatgggcgcggggttcgtgctcttcgtcaatccctacaagttcgtgccgggcggggtctacggcatgggtatcgtgctgcataacatcttcccttcggtccaggtcggtacgttcggttacatgttcgacattccgctgatgctgatctccatgctggtcttcggcggcggtttcggcacgcgcacggtgctggcggcgctctatacgccgggctttatgaacgtgctcacgcggctggtctacccgaatcccgaggcggtcgagtcgctggacccttcgctgctgctgggcgggcggctggacctctcgaacgacctgctgctgacgtgcgtcatcggcgccgtggtgatcggcatcgggcagggtatcgtcgtgcggcagcaggcgaccacggggggcacggacatcgtgggcatgctgttgcagaagttcgccgggatcaagttctcgacgggcatcctgctggccgacgggttcgtcgtgctgtcgggactggccgtgatcggcttcggaatcggcacgggcgaggcggcagcgaacggctggatgctgacgctctattcgctcatcacgatctacatctcgtcgcgtgtgatcgcctacctgctcgacggcgcgtcgtacgacaagctgctgttcatcatcagcgaccaccacgaggagctgaaacggttcatcatcgacgacctcgaccgcagcgccacctacatcaagtcgaagggcatgtacaccgattcgctgcgcgacatgatctttctggtggtgagccgcaaggaggtgcgcctcgtgcagcacaagatcaaggagatcgacccgaaggcattcgtcgtggtgacggatgcctacgaaaccttcggggagggcttcaagcagttccccgagaaaaacgagatacaggcggaataggctccgccaattaagaattaaaaattaagaattgaaaattgggatttaacgtcaatacattacggcctttggagggcgccgggcgcaaacttttcatcgagacctacggctgccagatgaacgtcggcgacacggagatcgtcgtttcgctcatgcagcgcgaaggctatgtctatacggaccgcatcggcgaggccgatgtcatcctgatcaacacctgctcgatccgcgacaacgccgagcagcgcatctggggccgtctggccgagatgaaacgctaccggcgcgcgaatccgggtcttgtcgtgggcgtcatcggctgcatggccgaacgcctgcgcgagaagctggtcgagggacctgcgggcgtcgatgtcgtggccgggccggacgcctaccgcgacctgccgcgcctggtgcgcgaggccgaggcgggcggcaagggtgtcaacgtgctgctttcgaccgaggagacctatgccgaaatcgcccccgtgcgcctcgaccgcaacggcgtgagcgccttcgtggcgatcatgcgggggtgcgacaacttctgttcctactgcgtggtcccctacacccggggccgcgagcggagccgcgatgcggagaccatcgtcgccgaggcgcgcagtttgttcgaaaacggctaccgcgaggtgacgctgctggggcagaacgtcaattcctaccgtacgggcgacgtcgatttcccggagctggtgcgccgcgtggcgtcggtctcgccgctgctgcgcgtgcggttcgccacctcgcatcccaaggatatgagcgacggcctgctggaggtcatggcctcgatgcccaacgtctgccgggcgattcacctgccggcccagtcgggcgccacgtcgatgctcggccgcatgaaccgcaaatatacgcgtgaatggtatctcgaccgcatcgccgccatccgccgctatctgcccgactgtgcgatcaccaccgacctgatcgcgggcttctcgggcgagacggaggaggagcacctgcaaaccctgtcgctgatgcgcgaggtgggctatgatttcgcctacatgttcaagtattcggagcgtccgggcacttttgccgaaaagcacctgggggacgacgttcccgaggaggtgaagtcgcgccggctgtccgaaatcatcgccctgcaaaacgagctgggccatgcgagcaacctgcgcgatgtgggccgggagttcgaagtgctggtcgagggcgagtcgaagcgcgacaggaaccagctgtcggggcgcacttcgcagaacaaggtggtggttttcgaccgcgggtatcatcgggtcggcgactatgtgagggttcgcatcacgggctgcacgccggccacgctattcggagatgtcatttccggaccgtgcaattaaaagtgaaaaattaagaattaaaaatttctgttttatgcgtttcgatgaactcgacctggaggatgaaatcctcgacggtcttgaggatatgaatttccacgagatgactcccgtgcaggagcacacgattccggtgattctggagggccgcgacattatcggctgcgcccagaccggtacgggaaagaccgcggcctatacgctgccgctgctgaacaaactgctcatcgagggcaaccccgacaacgtggtgaaatcgctgatcatcgtgccgacgcgcgagctggcgcagcagatcgaccagcagttccagggcttctcctattatgcgcccctctcgacgacggtggtctacggcggcggcgacggcaagggctgggacatccagaaaaacggcatgctgaacggcgccgacgtggtgatcgccactccgggccgcatgatcgcccacctgcaaaacagcggcgtcgatctttcgcacgtcgaatacctgattctcgacgaggccgaccgcatgctcgacatgggtttctcggacgacattatgaagatcatctcctacatgcccgccgaacggcagacgatcatgttttcggcgacgctgcccccgaagatccgcgaactggccaagaccattctgcgcaatcccgccgaggtcaacatcgccatttcgaaacccaacgaagccatcgaccagtcggcctacatctgctacgagcgtcagaaactgggcatcatccgcgagctgttcgccgagccgaccgactcgaagacgatcatcttctcgtcgtcgaaactcaaggtcaaggagctggcccatacgctcaagcgcatgggactcgacgttgcggccatgcactccgacctggagcaggcgcagcgcgaggaggtgatgctcaacttcaagaacaacaaggtgaaaatcctcgtcgccacggacatcgtcgcgcgcggtatcgacatcgaggacatcggcctggtgctcaactacgacgtgccgcacgaccccgaggactacatccaccgcatcggccgtacggcccgcgcggcggcttcgggcgccgccatgacgttcgtcagcgaggaggagcagggcaagttccaccagatcgagaaattcatcgagcgggacatccgcaaggccgaactgcccgagagcgtgggcgaaggcccgaaatacgctcccgacgagaaccgcggccgcttcggccgggggcgcgggggtcgcagcgggggagggcgttccggttcgggccgcggacgcggcggacgcggcgaccgttcgggtcgtaacgaccgggaccgtcgcagcgaacgcccggcggctgcgactgcggctgcggctgcggaacctgccgcggcacaacccgcttcgccggacagcgaccacgcttcgggccgtggcgaaggcaaccgcgggacccgcgaccgccgccgtcaccgcggaggccgcaatcggggccgcggcaacaagccgcagggcggcgaaccgacgacgggaatttttgtttacctccgttttaccgggcgtgatcacatactctaatgtaccgccgtccggagcgtatgccatctccctccctgaaggagggctggggtggggtcggatttatcttttatcccacgcgggatgcgcggggtcttcggccgtcagggcttcggcgaggctgatgcccagcgcccgggccacgccttcgccgtacgacggatcggcgttgtagcagttgcgcacgtgccgctgcttgatgaacagttccgaatcgcccatggcgcgcgccgtgttttcgcatgtcgcctgctgatctgcgggcgtcatcagccgccacagcttgcccggctgcgtgtaataatcgtcgtcgaattcgcgctcgtcgtagttgtagaccgcgccgtcgacggccaggggcggctccttgagggccggcgtgtcctgccattcgccgtagctgttcggctcgtagggcgtcgtcgcgccgtaattgtcgtcggtgcgcatctgcccgtcgcggtggtaggcgtggaacggacagcggggcttgttcaccggaatcaggttgtgattcacgcccaggcggtaacgctgcgcatcgccgtaggagaagaggcgtccttgcagcatcttgtcgggcgagaagccgatgccctcgacaatgttcatcgggttgaaggcggcctgctcgacttcggcgtagaagttttccggattgcggttgagttccagaatgcccacgtcgtgcagcggaaaatcgccgtgataccacaccttcgtcagatcgaacggattgattttataggtccgggcctgctcctcggtcatcagctgcacctgcatcagccagcgcggatagtcgccgcgttcgatggcttcgaacaggtcgcgctggttcgattcgcggtccttggcgatgatggcctcggcctccgcgtcggtcaggtttctgatcccctgctcggtgcggaggtggaacttgacccacgtgcgtcggttgtctttgtcgtagaagctgtacgtgtggcttccgaatccgtgcatgtggcggaaggaggccggaatgccgcgcggcgacatcgtgatggtcacctgatgcagcgcctcgggcagcagcgtccagaagtcccagttgctgttcgggctgcgcagtccggtgcgcgggtcgcgcttgatggcgtggttcaggtcgggaaacttcagcggatcgcgcaggaagaagaccggggtgttgttgcccacgaggtcccagttgccggcgtcggtgtagaatttgatggcgaagccgcggatgtcgcgctcggcatccgccgcgccgcgttctccggccacggtcgagaagcgcacgaagcacggggtctgcttgcccacctcggcgaagatcgacgcccgggtgtatttcgtgatgtcgtgcatcacggtgaaggttccgaaggctcccgatcctttggcgtgcatgcgccgttcggggatgacttcgcggtcgaagtgggcgagtttttcgaggaaccacgggtcctgcaaggttacggggccgcgtttcccggctgtctgaatgttctggttgtcggcgatgggccggccgttttcggctgtcagtttctttttgtccatatggcttttgtttttggttgtgacggattccctgtttgtaaatgtatgatataattctgtgaataacaagcggataatattgatagtgccataacttaaacctataatggccaaaatcgtgcccggacggaacggcgtgcggactgaaaatttccggccgaatgtgcggatatttcggtccggggcgttatctttgagaaacggaacggcggttccgggaatcgggaacgttcgctgaaacagtttagcctgcaatgattgatttgaatttcagccgtgagttttttgcggccatgctggtcacggaggtggagaaggtcgggttcgccgtcctgatccggacatttcccgatgcaatggaattgcagcaccccgctgtcctgatccggggtatccgggagtttgcttttgatattgccgaaggctgcttcgtccgcctcggggcgcgttgcgacgggaagatagaggccctgcggtccggaatcagcaagtccggggacgaaatccggttcacggcggtggattacgtgtaccgggagtccgagttccggaaaaaatatgtgaaccgggtcgtcaatccttttttgacgtaaaatcggtcgacggccctgcggaaagcataatgcgaggggacggcgttcatttctgccggaagtaaatcagcactggaagtcccataatgaaagcccctcctttcaaggaggggtttggggaggttgtcggcacaggatttttcggggttggccgccgcttgggctgcaattccgtccggaaacctacttctgccggaagtaaatctgcaccgaaagtcccgtaatgaaagcccctcctttcaaggaggggtttggggtggttgtcagcacgggatttttcgggattggccgccgcttgggctgcaattccgtccggaaacctacttctgtcggaagtaaatctgcaccgggactcccgaaaaatcccagtggtcgcgcatgttgttttcgaggaagcggcggtaaggctccttgatgtactgcggcaggttgacgaagaacgcgaactgcggcgtcggcgtcggaagctgggtcacatacttgattttgatatacttgcccttggtcgcggggggcgggtagttctcgatcagcggcagcatgtagtcgttgagctccgaggtcgggatgcggcgtttgcgcgactggtagacgcggatggcggtttgcagcacgtcgaagatgcgctgtttgttcagcaccgaggtgaagatgatcggaatgtcgttgaacggagcgagtttctttcggaggaactcggtccactccttcatcgtgttgctgtccttctcgatcaggtcccatttgttgaccacgatcacgcatcccttgcggttgcggacgatcaggttgtggatgttcaggtcctgcgattcgagtccctgccgggcgtcgatcatcaggatgcagacgtccgaattttcgatggcgcgtatcgagcgcatcaccgagtagaattcgaggtcctccatcgtcttgcccttcttgcgcatgccggccgtgtcgacgaggtagaaatccatgccgaacttgttgtagcgggtgtggatcgagtcgcgggtggtcccggcgatggaggtcacgatgttgcgctcctctcccagcagggcgttcgtgagcgacgacttgccgacgttgggacgccccacgatggtgatgtggggcaggtcttcgtcctcctcggaggccgtttccacgggcagtgcgtccagaatggcgtccatcaggtcgcccgtgccgcttcccgacatcgacgagatgcagtagggatcgcccagtcccagggcgtagaactcgtgcgaggagtagatctggtcgttgttgtcgaccttgttgcagacgaggatcaccttcttcgaggtgcggcgcaggatgtcggccatcagcatgtcgaggtcggtgatgccggtgcgtacctccacgaggaagaggatcacgtcggcctcgtcgatggccagcaggacctgacggcggatttcgtcctcgaaaatatcctccgaattgacggtgtacccgcccgtgtcgatgatggaaaactccttgccgttccagtcggtcttgccgtaatggcggtcgcgggtggttccggccgtcgcgtcgacgatggccttccgttcgcccacgaggcggttgaagagggtgcttttgccgacgttcggacggcccacgattgctacaaggctcatatcttatctttttcttattctgctgtttgctccgttttacaactccgaccgcggtagtcgcggcctatggccgcgtttacaaattggacccaccctaaatccccgccttggcggggacttgtcgcatcgcgaccgggattctgaccggaatgccgctaccatgaatcacttgcaaagatagcgcaaatccgcgaagggaaaaactttttcgggtattttgtacttccgaaccgtcagatatagcggctttcggtgtcgcccgcctgcacggggtagagcagtacggagctgtatccggagaagaaatgttcgaggtaggccgggatacggctcatcacggggttgtacgagacgcggtcgcggcggctcatcacgaaccagaggcagtcgtcggcgcggatgtcgtgttcgagcgacggcaggtcgtcccattgcgcgaagggcacgaagtcgatgttggccgggtgcttgcggcctttggggcggaggtattccagcgtggcctccggggcgaacacgatgattctggcccccgagttttcggccaggcggcggatgcggcgctgccacatctggaatcccgcctcctgctcggccttttcgggtacgacgatcaggtggcgcttgatggtgttcagcggctgcacggggttgtagatgaaggtcgtgacgttgctctgtgccagcacgtcggcggccattttgccgatgccgggacccgacgccccggggatgcccgtcagtcccggcacggccggggaggcgtggtgcatgcccatcacgatgtcggtgatgttccgttcgcggacgacgctgacgatggcgttcgagatgttcacgtcgtaacgcatcagctcctggaggtagatgtcgcctgccgcggccgccgtcgccgccgcgtcgaggattttctgggcgcgtttctcgacgttcgggtcctccaccttgttgtcgatggcgtgcagggcgtatagtccgttcggctccttggcgcgcttgagcatcgaactcaaccataccagttcgtcggccgtgcgttcgtcggccacggggatcaggatgtggtcctcctgccgcggctgcctgtctccggtgtcctgggcgctgcgcatggcgatgttgtgggcgccgcgctgcgtggcgaaggtcgacacggtgcaggtggccagaatcatcaggatcgtgccgttgagcacgctctcgctcaagaggcggatcggctcgccgtcgggcgtgtgacccaggatgatgttgtagccgaccatcacggcggccaacgtcgcggccacatgggccgagcttaagccgaagatgacggtccgctggtcgggcgagagtcggaaggtcttctgcgtgaaccatgcggcgacgaatttcgccgccgtgatcagcacgatcataatggccgccacttcgaggctctcccagtcgcggaagaaggcgcggtagtcgatcagcatgcccacgccgatcaggaagaaggggatgaagatggcgttgccgacgaactcgatgcggttcatcagcggcgaggtgcgggggatcaggcggttgagcgcgagtcccgagaggaacgcgccgatgatcggttccagcccggccatgtgggcgaggtaggccccgaggaagaccatcgccagtacgaaaatgtactgcgagacgttgtcgctgacctgcttgaagaaccagtgggccagcagcgggaagaggaagacgatgatggcgatgcagagcgagacggagcctgcgagccgccaccagaacatgtcgtcgacgttgcccgtggccatgccgacgatcacggtgagcagcagcagggccagcgtgtcggtgatgaccgtgccgccgacggcgatcgtgacggccttgtcgcgggcgatgcccagtttgctgacgatggggtaggcgatgagcgtctgcgaggcgaacagccctgcgagcaggatcgacgaatagatcgggaagccgaggatgtaatagccggccaggatgccgaaggccagcgggacgcagaaggtgtagcctccgaagatgaggctccgccagctgttgcggcggaaatcggacatgtccatgtccagtcccgagaggaacatgatgtacagaagtccggccgtacccgagaggatgatgctgctgtcgcgcagcacgaggttgaggccgtggggtccgatcaccgcgcctgcgatgatcagccccagcagataggggattttgagtttgttcagcaggagcggagccgcgaggatgatgaccaggatcagcaggaatttcaggatcgggtcttcgagcggcagcgtcaggtttatgtgtgcgaagagcagcatgggcgcaggttgtttttttgtagtcggggctacgtaaaggccggaggcgcaaaaccgaatccgaagcggttcggcggggctttccgacggataaagtgtcgtaacgacaccaaatataataaaatctgcgttcccgtccaaacggtgcgcggcgttttctcgtgcggcgggctgatccgtcgattcgctgaccgctttttcgcgtgcgtgcggcatctccgcgacgatggatgcggcggcttccgcggcgggtgggcggtccgggccgtcccgttgcggccggttccgccgccgctgcgtatctcgcacgttttttgtttattggatcgtgtccgccgcgcggcggagaggggcaattgtgaaataatcgccgccggaaacgcgttttttgcggaaaaaaatgtaactttgaaaaatttggaacccgaaatttcgtctcggatgagcgtagacaaagtagacaaacgattgctcggacccgtgcttgcgggcttcttcatcatgggtttctgcgacatggtggccccgatcacgggccgcatcgccgccgaattcccgcccggacagcaggccgccgtgagcttcctgccgacgatggttttcctctggtttctggtgctctcgactccggtcgcggcgctgatgaaccgctggggccgcaaggccacggcgcttctgggctacggcttcaccgtcgcggggctgatgacgccctatgccgccggcgcggactgcgctctggggtggtatttcgcgggcttcggcctgctgggcgtcggcaacacggcgatccaggtggccgtcaaccccctgctggcgaccatcgttcccggcgagcggatgaccagctacctcaccgtgggtcagatattccgcaacacttcgctcctgctgctggctccgatcgtcacggggctggtcgccgcgacgggttcgtggcggctcctgctgccgatctatgcgggccttacggtggtcgggggtctctggctgcaactgactccggtgccggaacctgcgcagagagaacgctccgcgggactcgccgactgcttccgcctgttgaaaaaccgtgccgtgctgctctcgacgctgggcgtggcgtgctttatcgccgccgacgtgggcatcggcttcttgtcggtgcggctgatcgacaatccctcgtcgatcctcaccaccacgggcttctacgcctgccgcatcgtcggtacattgatcggcgcgtgggtgctggtgaaggtctccgacgtgaaatacctgacctggaacatggccggggcgctggcgttgtgcgcggcgctgctgttcgtgcgcaacgaggccgccatctacgccgccgtgggagtgctgggcttcgccatggcgtgcgtcttcgccacgttctacgccgtggccaccaaggccgttccggagaacgccaacgaggtggccgggctgatgatcatggccatctcggccggggcggtttcgggacccgtctgcggtgcgatcgtccgtgcctggggcaatccgcacctgggcatgctcttcgtcgccgcgtgcgtggcctacatgctctgggcgtcgatacaattgaaaatgaaaaattaagaattaaaatgatgcttcgcagaatcgtactgacccttttgtttgcagccattgcggcgggcgccgccgcacaacggccccgcgcgcgggtggagtggggcgtggtcggcggtatcaatatccccgactacacgaccaatatgagtgaaaccgacgtgaagaacaagctgggctggcaggccggtatcacgacggccgtcaacctcggggccttcgccatcgagccgcagatactctacgtccgccagggcctccgtatccgtcccgagggcgggagcgagatcaacctcaagtccaattcgatcgacgttccggtgctggcgtcgctgcggctgctcaatcccgtgcgaatctacgccggtccggtcttcacggtgatgaacgactgcaagcagaagtcgggcggcgacctgctggacttcggccgcgtgcgtccctcggtgtcgtacaccgtgggtgcgggcatcgtgctgatgcgccacctgctgatcgacctgcgctacaacggccagttccgctcgaaacacgacgtggtgctgcccgacgggcggcagctcgacaaactccgtacgtataacgtggcgctcagcttcggctatttattctgatcggtctatgacggaaactgtcggaaaggaaatcatgctcgaaggcgtcgatccccgcgaactctacggggcgcaggacgtctacctcgaacagatcaaatcgctgcaccccacgctgaagatcgtcgcgcgcgggcagtcgctcaaggtcctcggcccggaggccgacacgcagcgtttcgccaaacgcatggaggggcttgcggcctactatgtcaagtacggccacgtctcggccgaggtcatcgaacagtgtttcgcgggcggtatcgcgcaggacgacgccccggtcgacaaggacgtgatcgtctacggcaacaacggcacgatcgtccgcgcccggacggtcaaccagcagcggctcgtcaaactctacgacaggaacgacctgctgttcgccgtggggcctgccggctcgggcaagacctatacggccatcgcgctggccgtccgcgcgctgaaggagcggcaggtgcggcgcatcatcctcacgcgtccggccgtcgaggcgggcgagaagctgggtttcctgcccggcgacatgaaggagaagctggacccctacctgcaaccgctgtacgacgcgctgaacgacatgatcccgccggccaagctccagaaacacctcgaagaggggaccgtgcagatcgccccgctggcctacatgcgcggccgcacgctggacaacgccttcgtcattctggacgaggcgcagaacaccaccctgtcgcagatcaagatgttcctgacgcgcatgggccgcaatgcgcggttcatcgtcacgggcgacgtgacgcagatcgacctgccgcgcaagtcggacagcggtctggtgcgcacgatggagattctgcggggcgtcgacggcatcggcatcgtggagttcgacaaacgcgacatcgtccgccacccgctcgtgaaacacatcgtcgaggcgttcgacaggagtgtcgaaaaggacgggaccggggaccgttgaccgccgccggcccggagcggcggacctgtcccttcccgggggcgcgctgaccggctgcgacagcggccgccggaacggaagagacggagaaagagagagatttgaacgatatggatatataacacttaaacttcaatattatggaccgtaatttggtcgcgctgaaaccggcgcttgtatggaaacatttcgcggagatcgtccgcatcccgcgcccctcgtcgcacgaggagaagatccgccgctatattctcgatttcgcccgcgcgcagggcctcgaatcgaaggaggacgcggcgcacaacgtctatgtccgcaaacccgcctcgaaggggatggaggaccgcaagggcgtgatcctgcaagcccacctcgacatggttccgcagaagaacaacgacaaggagttcgatttcaccaaggaccccatcgacgcctacatcgacggcggctgggtgacggccgacggcacgacgctgggcgccgacaacggtatcggcgtggcggcgatcctcgcggtgctggaggaccggacgctgaagcacgggccgctggaggccctgttcacggccaccgaggagaccggcatggacggtgcgaacggtctggaaaaggggctgctgcacggcgacatcctgctgaacctcgattccgaggaggagggcgaactctacgtgggctgcgccggagggctcgacgccaatatgaccttcggctacaaggccgagccgacgcccgcgggcggttataccgctgcgaagatcagcgtcaaggggctcaagggcggccactcgggcatccagatcgtctgccagcgcgccaacgccaacaaggtgctgttccgctttttgaatgccgcgccgtgcgacgtgctgctggcgtcggtggacggcggcggactccgcaacgccatcccgcgcgaggccgaggccgtggtgctggtcgaaaccggggactacgacgagttcgccgccgcggtgaaagcctacgaggagaccgtaagggccgagtacgccggcatcgaggactcggtgtcggtcaaggtcgcggaggtcgggaaaccggctgaaatgctgccgaaggaggttgccggaaatctgatcaaggccgttgcggcctgccctgacggggtgcagcggatgtcggtggccatgcccgggctggtgcagacctcgacgaaccttgcacgcgtggtgtcggacggcaggacggtgaaactccaatgcctgctgcgcagctcggtcaacaccgagaaggaggcgctgggcgagtccatcgccgccctcttcgcgctggccggggccaaaacggaactcacgggcgcctacaacggctggaaccccgacatggagtcgccgatcctgaaggccatgaccgcctcctacgaggcgctgtacgggaagaagcccgccgtgacggccattcacgccgggctggagtgcggcatcatcggcagcgcctatcccgggctggacatgatttcgttcggcccgacgatctgctacccccactcgcccgacgagaaggtggagatcgcctcggtcgggaagttctacgacttcctggtcgacacgctgcgcaacgttcccgaaaaataatcgcagcgtggcggccgattccggaaaatggttcgtcatcgtcaatcccgtggccggaagcggtcgcgggcttgaccattttccacagatttcgaaacacctgcgcgatgcccacatcctctgcgaaccggtcttcacggagcacaagttccacgccacggaactcaccgtcacggccgtgcgcgaaggctatcgccggatcatcgtcgtgggtggcgacgggacgctgcacgaggtggtgaacggactgttcatccagcaggaggtgtgtcccgacgaggtgctcgtggccgtggtggccgtgggcacgggcaacgactgggtccgcacgttcggcatctcgaaccgctatcaagacgccgtgaaggccatcagcgagggttattccttcctgcaggacgtcggggtggtctcctacgaggaggcgcactaccgccagagccgctacatggccaacgtcgccggggcggggttcgacgcgcatgtcgtgcgcaagctctcgcacctgaaaaagaagggtcaccggagccgctggcgctatacgtggtgtctggtgaagaatttcttccgctacaagtccacgggcgtcaaggtctgggtcgacgaccggctggtctacaacaacctgctgctgtcggccgccatcggcatctgcaagttcaacggcgggggcatccagcagctgccggcggccgtggccgacgacggcatgctcgacctgtcgctgatccgcccggtgcacttctggcacctgctgttccgcttccactacctgttcaacggcggcatctaccgcattcgccacatcctccaggagcgcggaagccgcatccgcatcgaatcttcgcccgaggtgtcggtcgagatcgacggagagccgctgggccatacgccgctcgaattctcgattcttcaccgggccatccgcatcgtcgtggcccgcgatttctaccagcggtgcgccgccgtcggggcggagaccccggccgggtagcgcgcagccggaaaaagagagggccggacccacttcgggtccggtctttttgggctcgaatcatcaggtgtgtgcgcacacacttgctattttcgaaaattttgcatagctttgccgatgtaacgccgaagaacagggcaaaccatgtccgacaacgaacataccacggtccgcatcgtcgacatcgcccgcatggcgggggtgtcggtggcgacggtcgaccgcgtgatccacaaccgcggcaaggtctcggaggagaacctcgcgcgcatcaacgaggtgctgcggcgggtcgactaccgtcccaacctgatcgcccgctcgctggcgtcgggccgcaggtacacgctctgcgcggtcatgccccgtttcgccccgggagagtactgggccgatttcgaggctggaatcgcccgcgccgaggccgaggccgtgcgttacaacgtcacggtccgccgtttctgcttcgaccagtacgaccgttcgtcgttcgaaagcctgctggagacgctgcgccgcgaggagttcgacggcgcggtgatagccacgctcttcgcggagatggtcgagccgttcacccgcgaactcgacgcccggggagtgccctatgtcttcgtcgattcggacatttccgcctgcaaccggctggcctatttcggcacgtcgtcgttcgacgccggggcggtcgccgcacggctgctgttcgaccgcctcgatccgggagcggacatcgtcgtgggccggatcgttcaccggggcgacgccggttcgaaccagtggcgcaaccgcgaggcgggattccgcagttacctcgaagcgcatgccttccggggccggctgcactacgccgcgctgcggctggacgacgaagcctgcaacggccgcgtgctggatgagatgttccgcgaaaatccgtcgattgccggggccgtgaccttcaattcgacgtgttatatccttgcgggctatctggcggcgcggcggcgcgatggcgtgcggctggtgggctacgacgtgatccgccgcaacggagagatgctctccgcgggcgtggtgacggcgctcgtcgcccagcgtcccgaggcgcagggctaccgcgcggtgatggccctgtgcgaatggctcgtcgagggccgcgctccgtcgaaggtcaacaacatgcccatcgacatcctgctgaaagagaatataccgtattataaaaacaacatcatctgaaaaacatgaaaaatctctttgacatccggggccgtgtcgtcgttgtgacgggtggggccgggattctgggccgctcgatctgcgtttacctcgccgggcagggcgcacgcgtcgctgtgctcgaccgcgatgaaaaggcgggcgaagcgcttgtcggcgaaatccgcgccgcgggcggcgatgcgctcttcttcgcgaccgacgtgctgaaccgcgaggtgctcgtgtcgaaccgcgaggcgattctcggggcctgggggcagatcgacatcctgctgaacgccgcgggcggcaacatgggcggtgcgacgatcgctcccgacaagtcgttcctcgacctggagatcgaagctttccgcaaggtcgtggacctcaatctgttcggcacggtgctgcccacgacggtcttcggcgaggccatgacggcccgcaggaagggcgtgatcgtcaacttctgctccgagtcggcgttgcgtccgctgacccgcgtggtgggctacggagccgccaaggccgccatcgccaactacacgaagtacatggccgccgaactggccatgaagttcagccccgagatgcgcgtcaacgccatcgtcccgggctttctgctgacgaaccagaaccgcgtgctgctgaccaacgaggacggttcgtacaccgaccgtgcgcggacgatcatcgcccacacgcccgctggacgcttcgccgagccggaggagctgctgggtacgatccactacctcgtcagcgacgcttcgtcgttcgtgacgggcgcgctggccgtcgtcgacggcgggttcgacgctttctcgatttgatccgccgcgggagccgtctcgtcggcggggtctgacgggcacggcatcgggccggaatcattcgcggcaattccgtcttttcggccggggaaagaagctaacacgcgaacatgcgaacaggggcgaacatctcttgttcgcttgttcgcggagaatcccggcatcgcccctggaagcggttttaaaccgccgcattctcgcttgcagcggagaaagaacaacgacagcccgcgtgcccggagcgggaggctgcatagtcttgttcttgctgcgcccgctcaacgcgggccggaggttgttcccgcgaaagcgacatgcggatggttttggcgcttttaacttcgctacgctcgttttcctccttctggcacggcatagcccgcaagcggtctctgctcgtgctgcgtgcgtcggttgccaccaaaaggtagcatatcccccggggcgcatgccgcggttagctgccaaccgaaaaggcggcaaacaacaccagtcgtagactgcgaatgaatgaggtgcttgcagcggagaaagcaccgtatgtgaaaaatttgaaaacctaaaaacaatacatccatgtatctttgcaaacaatcctggcgctggtacggtccgaacgaccccgtaagccttcaggacatccgtcaggccggggccaccgacatcgtgaccgccctccatcacattcccaacggcgaggtgtggaccgtcggggagatcgaaaaacgccgaaagacggtcgccgacgcgggccttcgctggtcggtcgtggagagcgtccccgtccacgagcatatcaagacccgcacgggcgatttcgagcgctatatcgagaattacaaacagtcggtccgcaatctggccgaatgcggcgttaaagtaattacctacaactttatgcccgtgctggactggacgcgcacgaacctcgcctacgagttgcccgacgggtcgcgcgccctgcgcttcgagcgtgcggcgttcgtggccttcgatctcttcatcctgaagcgtcccggcgcggagaaggactattccgaggccgagcgcgccgctgccgaggcccgcttcgggcggatggacgccgcggaaaaagagctgatcacccgcaacatgatcgcgggcctgcccggctcggaggagagtttcacgctggagcagttccagcgggagctggaccgttacaaggatgtcacggccgagacgctgcgcgcgaacctcgtggcgttcctgcgcgaggtggctcccgtggccgacgaggcgggtgcggtgctggcgatccatcccgacgatcctccgttcccgatcctcggtctgccccgcattctctccaccgaatccgactttcagaaattggtcgaggcggtccccaacccttcgaacgggctgtgcctctgcacgggttcgttcggagtgtcggccgcgaacgacctgccgggaatgatgctgcggcagggcgaccgggtgaatttcgtccacctgcgctcgacgcagcgcgatgccgagggcaacttctacgaggccaaccatttggagggcgacgtgccgatgtacgacgtgatgaaagccctgctggagattcagcagcgccgacgcatctcgatcccgatgcgtccggaccacggccaccagatgatcgacgacctgaagaagaagaccaatccgggatattcgtgtctgggccgcctgcgcgggctggccgaactgcggggactggagctgggcatcgcccggtcgctgtttgccgataaatagggcagtcttgcgcatgacgaatcggtgcgcctcgtgaggggcgcaccgattgtgtcagaacgggttccggagctattttttggccggggccgccggggtctgctgtccggcagcggttttcggggccgccggggtctgcgccgtggccgccggggtcgccggaacggtctcgatcacgtccacctcggtcaccacccagctgaaaaggtcgttcgcacactggctctccagccggcggatctgcgacatgtcgctcgtgtcggccagaatggcgttgaagaactggtccatcgtggtgtacgtcgcattgaccttcgccgcgaagcagttgtaaaaggctttctgctgctcgtggtcaagccctgcgggcagcacgccctgtgctacgaggtagttgtaggggtagatgtgccgcatgttgcgggcgtcggcgttcagttcgtcgacgatcgtcgagacgaccaccatgtccaccgtgtcgtcgacgccctgcatctggacgaactccatgtagacgggataactgttttcgagctgcccggccacttcgtcggagaagagcacgaactcggcgtcgttcaggtcgtcgaggtacaccatctggcggtagctgcgcagcgcctcgcgcatcgccttgcgctgttcgtggttccattgccgctgctgcgagcagccgaaaaatcctgccgcgaagattgccagcagaggtacacagaggagaatttttttcattttttaccctgattttggttttacttcatttcggaacgcaatagatgtgccaaaaaaatcatatctttgaggaaaagaacccgttatggatgttttgagtttccgcgactactgcctgtcgctgcccctcacggaggaatcgacgccgttcgacgagacgacgctggtctacaagatcggtgggaagatgtacgcctgcgcggatatgaacgatttcgggcaggtggccgtgaagtgcgaccccgacgaggcggtccggctgcgcgagcggtacgaggagatcggcccggcctaccatttcaacaagacgcactggaacggcatccgcaccgcgggcgacctgcccgacgccttcatccgcgagcagatacgcaactcctacctgctggtcgtgcggcgcagcgtcacgccccggagcctgcgcgaggagattctgcgtcatgtcgaagagcacgggctgccggaatgaaccttcaacctccgaaaacgatacgatgacgatgagaatgcgatttctttttgcggcgctgacccttgcgctggcagcgggttcgtgcagccgcgagccgcggaccgaacttttcaacggccgggacctcgccggatgggtgtgcgtcaccgacccggagggcgtcggcgacgcccgggatgccttctccgtgcagaacgggaatatccgcatagcgggcagtccgttcgggtacatgcgcacggaggagacctacgacgattaccggcttcacgtcgagtggcgttggatcggcgaggcgacgaacagcggcattttccagcgcgtgcaggccggcgaccggctttggcccgaggctgtcgagtgtcagttgcaggcggggcgcgcgggcgacctgctggggctgggcggcgcgaagatcgccggggcggagagcaacggaagggtcttcatcaagccgcgcagcggcggggagtgcgagcggcccgcaggcgaatggaactgtgccgagatcgtctgcgtgggcgatcatatcgcggtctgtgtcaacggcgttttgcagaacgagtgcaccggatcggtccgcagcgggtatatcgcgcttcagagcgagggcggtcccgtggagttccgcaacatctggctgacccgcttgagacgcgggatttaggttgcggctggcggcttcggcttgctctcgtcacgaacacgcgaacatgcgaacaagggcgaacaccccatgttcgcatgttcgcgtgttcgcccatgttcgttcgttcatacggaactgcaatcgcttcgcaaaagcatgaagcccatttgcggcgagtgccgcggggtgttttgtaccttttgatcgcaaaaggtacccaaaactctccgcatgtcgctttacgcgggaccgtcctccgtcccgcgctgagcgggcacagtaagatcaggcctttacagcctcccgctccgggcgcgcgagccgtcggacactctttatccgctccaagcgataatgcggaatcctctccgaccattacactcattacactcattacactcattacactcattacatcattacctccattacagggggtacccgcccatgtaatgtgtgtaatgaaatgtaattgctccggacacgcccattttgccgcttgcggcataaagcccctccgcgggaggggtttggggtggggtagatttgcagacgcggctcacggccgcgggttgcggcgttgggacttgaacgaacagtcgaaataccggattccctgtaccgtgtaatacggtaatgaactgtttctactaatccctctacgcaaaatccgcaactttgttgcggataaaatagggtatccctatacgtatatttctatatatacgtacttctatggggttatgtctctgcaaagatacgacctgatcgccccgaatggtttctatattatcggaaacggcgtgtgtcgcttaacggcattacatccattacagggggcattcacccatgtaatgtgtgtaatgaaatgtaatcgtaagtgcaaggtgtgggctgaatcggcattttgcattctgggacgaataaatcctgctttgcgaacacgcgaacatgcgaacaaggggtgttcgcccatgttcgcatgttcgcccatgttcgcgcagaatcccgccctcgcctctggaagcgggttttaaaccgccgcattctcgcttgtagcggaataagaacaaccgcggtcttcgcccgctgttctttgccgctttttggtcggcggttaaccgcggtcttcgcccgcggagagtgatgtactttttggccgcaaaaagtaccaaaaactccccggcagatgccttcgcctacttcgtcccgtctaacgttcgaaacgggcgcctattcgcggggacgcacgcgcccctgccccgtttcttatcacttttagccgggccttcgtttcacggctccggcatcgggccggaatcgttcgccgcgttccgcggcgggaggaggtgcaaaatggcccctttcgcaacctgaaaccccggttcttaaccgggcgcagaaccgggcggagagcgggccgaagctgccagtcgcaatgcaaatcccggttcttaaccgggcgaacatgcgaacaagggcgaacaccccttgttcgcatgttcgcgtgttcgcaggtaaaacggatttttaagcccgggcctgccgccgccatcggaggtaacccgccacggccagcgccgagtagagggcgtaaagccccgcggtgtagggcaggtccttatagaggtaaagcccgacggtcaccagatccacgaccagccacacgagccattgctccaccagcttgcgcgacagcatccacatcgccacgaccgacagcgccgtggtccccgcgtcccagaagggtacggtgctgtccgtgaagcgggtcagcagcaggtacagcccgatgtgcgccgcggcgtagacccctgcgagcgccgggaccgtccgcaggggcgtgtggccgatgcgcagcgcggcggcccgctttgtgccctccgcatcttcagggtcggtcagcccggcgtccgtttttcggcccctcctgcgccacacgagccacccgtacagccccgccagcacgtagtaagcctgcatcgagcagtcggcatacagccccgatttgtagtagagcgccccgtggatcagaggcatgacaagccccacgatccacagccggatgtcggcgcggtattcgagccagaggtagagcaatcccaacaggacgccggcgatttgcaggaggagttttatgtccattgtttcaacattcgtattgtcattccgaagaggaccgaaggtccgacgtgggaatctgctggaagcgttgtaaggtcacgactttcgcccggattgccacggcatctgcgatgcctcgcaatgcacgaagcacaattatttagttttcagagctgaaattcggtttcagcggcgttgaaatcgcgcgttttaaaatttcaccgtgacgttcgccagcacgttcagcggcgcctgcgggaagtagtaggcctcgtcgatgcgtacgggcgcgggtccgctccacgtgtccatgtacgaatacccgtagccgttgctctcgtattccgcattgaacaggttgttgatcagcaggcccagccgaacgctgcgcgccgtgcgggtgcggaacgtataggcgaggttgaggttggtcacgcagtaggcgtccagcgacagggcgtcgttctcgttgttggtgaaatactgcttgccgacgtgctgggtgtggaacacggcttcgaatccgcggtggtggaaattcaggaaggcgttggcgatgacgtcgggcgaataggcgatggtcatgtcgcccagctccttgccgtaggtggggctatccttcagtgcgtcgacgtagttctcgatgcggttctgcgagaaggtggcgttggcccccacggtgaaccacccggttgcgcgccacgaggccgacagctccacgccccggcggtagctgtccgggacgttggtgttgagggcgttgctgtcgtcgttcaccatgcccgtcggcacgagctggtccttgtacttcatgtagtagagattcacccccagcgagaggcgcggcgccgtgtactggtagcccagctcccagtcgtagagcttttccgacgagggataggtgtcgtcggccgcgaatttgtaacggtcggtgaagtcgctgcgcgtgggttccttctgggccacggcgaacgagaggtagaagttgttgcgctcggcgagcgtgtagctcacgccggcgcgggggttgaagaagtggtactgtttgtccacgtcgatgggctgcatcccgacctcctccgaaacgtagttgtcgttgacgccccaggcctgatagctgacatagcggtactggaggtccgcaaagagcctcaaccctttggccacggaccagttggcgcgagcgaagaggttggcgtcgtgcttgtccacgtcgttgtcgtaccagcggccgccgatctggctgccttccagtccgtccacccagtcgagcacgccccagtgggggcaggagtagtagctgtacgaaccgccgaaggcgaggtcgagtttccgcaccgagtaggccgccgaggcgttcagacctccgaggtggttgcgcatgatcttctcgcggacgaggtcggcctcctttccggcagcgacgtcggtcgggatattgaggtattcggagagcgtgcgtgcgtccttgtactgcttgtagaagccgtagccataggtgtagaatcccgtggcgttgagggtccacttctcgttgaaacggtgggagagcaccagctggttgttgatttgcaggtagttgtccgtctgatcgtcgtaatagtctaccgtggcgcgctgccgctcgccgtccttcatataataataggagtgcggtccgttcgaggtgtagtacatgccctcggtgtggaacctccggccgttgagacgcatctcctctttcgtcgcgcccgtgtaggtgagtcccgttttggccttgccgccgaacgaaatcagcttgagcatcgtgttgccgttgtagtagccggcctggaacatgtaggatttgaggtccgtggctccgcggtcgatgtagccttccgagccgatgtgcgtcagccgcgcgtcgagggtccagtggccgcccatcaggcccgaggagatgtgcacggcctgcttgttggtgttgtacgagccgtaggagagcgacgcgtcgccgccgaactcggtttgcagggcgtcggtcgacatgttgaccgctccgccgaaggctcccgtgccgttggtcgagatgccggcgccgcgctgcacctgaatgcttcccacggccgagacgaggtcgggggtgtcgtaccagtacatcgagtgcgagtcggggttgttcatcgccacgccgttgatcgtgacgttgagacgcgtcgggtccgtgccgcgcaggcgcacggccgtgccgccgatgccgatgcccgtttcgttggtggcgatcatcgagggggtcagggccagcagcgtggggatgtcggttccgtagctgttgcgggcgatctcttcgcgccggatgtcggagtaggccacgggggtggtcggggttgcgcgcgtggcggtcacctcgacctcctgcaagcggtacattctgaccgaatcgccggcgttttggttggcgggctgcttctcttcagcccgcagctgtgcggccgagcagagcgcggcggccgcaagtgaaagaaaaatccttttcatcgttaaactttttgagttaatggactgaaaaggggtatgtgttgttgattacgcttcgtcccggtctcggcattacccgtctccggttcaatgggtataatctcagcctgacagtaaggcacccctttgaaatatcgggtgcaaaggtaagtaaaaattcagaattcacaattcggaattcataattatttagagactgtctcttgtacagtttcttaacttgcagacattttcatctctgcgaagttcaattgtgaattctgaattgtgaattctgaattgcatggcgagcgtttcgcttgctatgcaaaggttccgaagcggaaaacgatcttctggcagtaggtttcgccggggcggagcagcggcgaggggaattcggggtggttcacggcgtcggggtagttctggcactccatcgccacgccgtcgtagtcggcatagcggccgcccgacttggtttcggggcatccgcccgcgagccagttgcccgtgtagatcatcacgctgggctgcgacgagagcaccgtcaccgaacggcccgaccggggttcgcgcagggtgccgacctcgcccaggatgttgggcttccagccgtcgacgacgaagggatggtcatagcccttgaagtcgcggatgtggttgaactccgacgagatgccggggcggaaagagcggaattcccgaaaatcctgcggggttccggctgcgtccaggagcttgcccgtggggatctggcgttcgttcatttccagaatcttcgagctgttcaggcgcagttcgtggtcgagcaccgacccgctgccttcgcccgcgaggttgaaatagacatggttggtgaggttcaccacggtcgtcttgtcggtccgtgcgaggtaggtgatctccagcgcgttgtcgtcgtcgaaatcgaatacggcctcgacgcacagctcgccgggatagccctggtcgccgtcctccgagacgagcgacatcaccacgcggttggtctccacgcggctctcccagatgcggttggcgaagttcttcgttccgccgtgcaggtggttcacgccgttgttgacctccagccggtactccttgccctcgacggtcatctgcccgaaggcgatgcggttggcgcagcgtcccacgctctttcccgaggcggctccgtcgaagaagtagccttcggggtgtttgtatcccagcgccacgtcggccatgcggccctcgcggtcgggcatcttcaccgagacgatcgccgcgccgtagttcgtgagctgcacttcggctcccgagtcgttgcgcagcgtgtagcgaatgattgcctcgccctccggggtcatgccccagacgtgttgttcgatttgtaccatagtttaatataagttcgacggggttaggttgttttcagatcggagcgattttgtctatgaacccccatcgaacttatattacggcgtttttaacgccggggctcatgttgaaaatccctctgaatctccctttgaaaagggcgactttactctattgcgggttttagattggtcagcagattgtcgatgcggcgcagggtctcctctttgccgatgaacgacgttacgtcgtacatgcccgggccttttccggcgcccacgagggccagccgcagggtgttcatcacctggcccatgccgtagcccttctcctcgatccaggcgtggacgatgcgttcggtgttctccagcgagaagtcgtcgattcccgccagcacgtcacgcaactcccgcagaatggcgggattctgccccttccagtacttgcgcacctgcttttcctcatactcccggggagcctcgaagaagaacgacgtgaggtcccacagatcggtcgtgaacgtcgcgcgctccttcataatgcccgcggctttgccggccacggcgtccgaaacctcgatgccgtggctgcgcaggacgggctggtagagggccgccagttcggcgtcggtcttgtggtgcatgtactgggcgttgaaccaccgggccttgtcgggctggaatcgggcgcccgatttcgagacgcggtcgagcgagaagctgtcgatcagctcctgcatcgagaagatctcctgctccgtgccggggttccagcccagcagcgccagcatgttgatgaacgcctcggggaaatagccgtcctcgcggtagccgtgggcggtctcacccgtcggagaggtccagaagagcggaaataccgggaatcccatcttgtcgccgtcgcgcttcgagagcttgccgccgcccgtgggtttgagcagcaggggcaggtgggcgaaccggggctgcacgtccgtccacccgaaggctttgtacaggaggtagtgcagcggcagcgacggcagccactcttcgccgcggatgacgtgcgacacctccatcagccggtcgtcgacgatattcgccaggtggtaggtgggcagcgcgtcggccgatttgtagagcaccttgtcgtccagcgtcgaggtgttgacctccacgtgtccgcggatcaggtcgtccatcgcgaccgtttcgttttcgggcatccggaagcggatcacccactggtcgccgcggtcgaggcgcgccttcacctcctcggcgggcagcgccagcgacgtggccagcttttcgcgcaccgcataattataggcgaacgcctcgccgcgcgcctcggcctccctgcgcagggcgtccaattcctcggccgtgtcgaaggcgtagtaggcccagcccgcctcgacgagttgcagggcgtatttgaggtagatttcgcgccgctcgctctggcggtagggggcgtgaggccctccgacgcccacaccttcgtcgatctcgatgccgcaccatttgagcgattccagaatgtaatcctccgctccagggacgaaccgctgcgaatcggtgtcctcgatgcgcaggatcatcgttcccttgtgccggcgggcgaacaggtagttgtacagtgccgtacggacgccgccgatgtgcagcggcccggtggggctgggcgcgaagcgcacccgaactggtctttccatagctgtattctttaatttttttacgatcccggtttgcggcgtcagacgttgaacaggaagtgcatgatgtcgccgtcctcgacgacatactccttgccttcgatcgacagtttgcccgcatcgcggcacgccttctccgaacccagagcggtgtagtcgtcgtacttgatgacctcggcgcggatgaaccccttttcgaaatcggtgtggatgatgccggccgtctgcggggctttcatgccgcgcaggtaggtccaggcgcgggtctcgtcggccccggtggtgaagaatgtttcgaggttgagcaatttgtaggccgatttgatcaggcgcgccacgcccgactcctccagccccaggtcttcgaggaacatctgccgctcgtcgaagtcttccagttcggcgatgtcggcctccgtggcggcggcgatgacgagcatttcggcccgctcgccggcgatggcctcccggacggcctcggtgtaggcgttacccgtcgcggcgctcttttcgtcgacgttgcagacgtacaacacgggcttgtcggtcagcaggttgaggtcggcgaccagtttgcggtcctccttgtcgagttccacggtgcgggccgaaagcccctgttccagcaccgccttgtactgcaagagcagctccacggcgcgcttggcctgcttgtcgccgcccgaggtggcctgcttctgggtcttggagagccggttctcgacggtttcgagatccttcagctgcaattcggtgtcgatgatgcccttgtcgcgcacggggtctatcgagccgtcgacgtgggtgatgttgccgttgtcgaagcaccgcaggacgtggatgatcgcattcgtgttgcggatgttgcccagaaatttgttgcccagaccttcgcccttcgaggcgcccttcacgaggcccgcgatgtcgacgatttcgatcgtcgtcgggaccacgcgcttggggttgtcgatctccgcgaggcggatcagccgccggtcggggaccgtgatcacgcccacattaggctcgatggtgcagaaaggaaagtttgccgcctgtgcctttgcattggacaggcagttgaaaagggtcgatttacccacgttcggcaagccgacgatgccgcattgtaacgccatttattcgtttcgtttatgttgctgtcagacaaattgcgcttatcgtgaaacaagcccacaaagatacgaatttcttttcaataatcggagacgctcgcgggtaaaagcggaaagggggatggtttccggctctgggcgcggaaaaaagcgcttctgtccgttccgtttatcccttggcaaataaaacctcttcgccaactggcgaagaggttttatttgccggcagcaaggctggctattcggccagcgaccattcgatcacgaccgggaagtggtccgaggggtatttccggttgtaactgttgttgacgatgcgccacgaaacgaccttcgtgtccttcggcgtgacgaagacgtggtcgatgcgcgacgcagcggcgggaggcgtcgagatgtatttgtagccgttgtaggtgggccagtctccgttggtcttggacggacagcggacgtagctgtcggcaaggatgcctgatccggcgatcgttttgtaggcttcggtgttttggttcgaattgaagtcacccgtgcaaaaggccggtttgccgcctgcgatctcccggaccttggccaccagcagtttggcgctctcggcgcgggccgtggtccctatgtggtcgaagtgcgaattgaaatggtagaattcccgtccgttcgcgcggatgcggaaatgcacccagttgcacatgcggggcgaataggagtcccagcctttggacccgggggcggaaggcgtttcggagtaccagaacgatcccatatccaatacttcgaatttgtccttgcggtagaaaacggggttgtagtggcgtcgttgggccgttttgtcaccgatgacgttttctccgacccaggtgtatccgtcgaggaacggctcgatgtccttgatctgggtcagataaggctcctgcgctccgaagatgtcgaacttctcgctctggagtagttggcgaagcaaatcccggcgggtcgtccatttgttgtcttgatcggaagagttgtcgtactggatgttgtaggtggcgacgcgaatcggatcgagccactcttttccaggtgcaggggcgggtgcgggatcgtcgtttcccgaactgcacagcgagaagagcggcaggcagagcaggaacagactgaaatacggttttcgtatcatttttccgaaagagattggtttcgaatttaagacgaactgtttccggttttgtcccccggggagcgaaaatttgctatttcgcattttttattcgatttttaccgcttgcagggggacaaaccggacggttttccgttatatcgaatgaccgaccaaaccaatgaaccgaatgtttcggcaacgcaagtacgacacccgacgaatcgaccggcagtatgccgaagagaccgacgtatatgttatgttgtataacagttacgccgatgcgctctatgcctacggcatggggttcggtttcgacaacgaaacggtcaaggatgtcatccacgacatattcctcgacattatgacccgccaggtcgacctgggccgcatcgtcaacatcaaggcctaccttttccggatcgttcacaaccgcctggtcgacctgcaccgttcgcgggtggacaaatgcgacctttcggaccgggagccgggattgcgggtgtcgctgacctcgctcgacgcgatgatcgaatcggagcacgtgctgcgcatccgccaaacgatcgagtcgctgctcaaccagctctcgcccaagcagcgcgaggcgctgctgctgcgcttcgtctacgagatggagtatgacgacatcgccgtcatactcgacgccacgccccatgccgtccgcaagttcgtgtcgaaggggctgggcaaacttcggaagggcagggagtgcggcaagacgatgaaaatagccacttgacacggcggacgctgttttttgcggttcgagggggacaaaacggcggattcgccgtcatagggaagagcgcggcgccgcagccgcagcatgcagtttgaagattacgattggaatcaatgataaaaccggacgatattaagaagcacacggcggagttcttcacctccgacccggacttcgttttgtggtgtctcgatcccgagcgggcgcaggacggctattggtgcggttacaccgaacgccatccgcaggacctggtcgaattcgagcgcgccgtgagcctggtgcgccgtgtgggcaagacccatcccgcgctgccgtccgtggagaaacagttgctgctcgaccgcatcctgaccgaccattacgcccggtgccgttttgcagcccctccccgccgccgcaaccgggcggcgctcttcgccgccgcttccctgctggtcgccggcgtcgtggcggccctgttctggagtgcggatttcacgggttccggactgccttcggccgaggcctatgagaacatcacgctcgtgacccgcgaaggcagccgcgaggtgtatgacgacatcgcccgtatcagccttacgcccaagggcgaaatcctgatcgacggcaaggagaacgaaggggcggagaccgatcgcaggacgccccggcaggaggtgcgcgtgcatacgagcgaactggtggtccccaagggcaagcgcgcacatctgcaactctccgacgggacgcgggtgtggatcaattcggcgtcggtgctccgtttcccgtcggcgttcggggacacgcgcgacgtcttcgtcgagggcgaagcctatttcgaggtggcgaaggatgcgaaccgtcccttcatcgtgcacaccgaccattttgcgacccgcgtgctgggcacgtcgttcgacgtgacgaccgcgccccgggccgacggttcgtcggccgtggtgctggtcgaaggctccgtggccatcgacgtggccaacggcgaatcggtgacgctgaatccttcggaacgcttctcgatgaaggacggcagctattcggtctacgaggtcgatccctataaatacatcagttggaaggacggactgttgttcttcacctcgaacacgctgttcgaagtcctgcaaaaggtggctgcgttctacaagatcgaaataacctgctccggggagatcgggagccggaagtgtaccggcaagctgatcctgttcgacgacctggacggcacgctcgacgtgctctccgacattttccggatcgcctacgtccgggggcccgacggctcggtggcggtgaggcctgcccccgacgattgcgccgacgccgtatatcgctgacaaccaattccagtcttaaatactaaccttaatactgttacttatgaagaaacttttctttgtgaggagtggctcgacatgccgtatgctgcggattcttgcggcggcgatgctgttgcttccggtgaatctccagcccgtccgggcctcccggcaggacgccggggccaaatcgtcgctgaccgtgaagatgaaggacgcaacgctgtcgagcgtctttgccgaggtcgagcggaccagccgctacgccttcatttacaccgacgacgtgcggccgctgctcgaccgccgggtttcggtttcggtcaggtctgcgaccatcgacgaactgctgtccgcggtcctcaagggaacggagctgaccggacgggtgcgcgaaagccaggtgatcatctcgaaagcgcccgcccggaaaaacgccgccgtcacccccccccctcccggctgcgaattccggtagggaaatcgtcctgcaggggacggtgatctcttcggccgacaacaagcccatcgtcggtgtttcggtctatgtcgaggggacgaccatcggcgccacctcggacatcaacggcaactacaccctcaaggtgccggcgggaacgaaacacgtcaccttcgcttttctgggctacgacaccaagaagatcgccgtcgccgatgtcgaactgttcaagctcgtgacgctgatcgaggcgtcgaacgtcatggacgacgtggtggtcgtggccttcggcacgcagaagaaggagagtttggtgggagccgtgcaggtcgtgcgtcccagtacgctcaaggtgacgtcgagcaacctatcgacctcgttcgcgggcaagatcgccggcgtcatctccacccagtcgtcgggcgaacccggcgccgacggtgcgaatttctggattcgcggcatctcgaccttcggggccaacaaatcgccgctgctgattctcgacggcgtggagatcgtctcggagatgctcaacaacattccgcccgaggcgatcgagtcgttttcgatcctgcgcgacgccacggccacggcgctctacggttcgcgcggcgccaacggcgtaatgatcattaccaccaaaaacggccgccagtcggagaagatggcgatcaacgttcgtctcgagtcgggcatttcgatgccgacgcgcgtgcaggacatcgccgacggcgtgacttacatggagaactacaacgaggcgctgcgcacccgcaccccggcgggcgaaacttatgtgcagcacttttcggacgagaagatcacgggcacgcgcaaccggctcaatccctacgtctatcccgacaatgactggtattcgatgcttttcaaggattttacggtcaacgagaacatgaatctcaatgtgcgaggcggcggcaaggtggtcgactatttcctcaatgcttcgatcttcaacgaaaacggtatcctgaagaagcccgcggagtcgaaattcaacaccaacatcaattcgcagaaataccttttccaggccaacgtcggcgcgcagctcacccgaacgacccgcgtgagtctgaagatgaacacgcagctgcttttctggcaccgtcccgtcgaagaggtgaaagacctgttctactatacgatgcgcgccaatccggtcgctttcccggccatctatcccaaaggctccgtggaggatctcgacgacccgattttcggaaatgccccttcgtgggacggtggttctacggacatcaatccttatgccctgttgagccgcggatacggacagcgccatacgcagtacatcaccacgaccttctcggtggaccaggacctcgatttcgtcaccaagggactgaaggtccggggcatggtctcgttctacaacaagacctatgcggcgacttaccgttctttttctccctattattacgaaatgaccgactataccgacaacggcgacgggactttcgactacaacctgcaaagcatcggcacgcccggatcgtcctatctgggaacctccacggggcggaacggttaccgtgagatctcgttgcaggggcagatcgaatattcgcgcacgttcggcaaacacgacgtcaacgccctgttcgtctaccaccagaaggagaaggtcgacaatcagcccgccgatgatgagtacaaggtgctcccttaccgcgagcagggtcttgccggacgttttacctatgggtatgacaaccgctacctgatggagttcaacttcggctacaacggctcggagaacttcatatcgggtcgtcgtttcgggttttttccctcgatcgccggagcgtgggtcgtgtcgggcgaaccgttctgggaaggtatccgcagcaaggtgaacctgctgaaaatccgtgcttcgtacggcctttcgggcaacgactatctggccgacagcagcaacaacatcgtccgtttcccctatctcacgacggtcaacatgaacaaggcgctctacgtgtggttttcgcccaacttcgtcaagcagaccggacacgagatcaagaccgtgggcaatcccctggccacgtgggaggagagcaccaaacttaacgtaggacttgaactgggactgttcgacgccctgacgctgaacgtcgacgtctacaaggaaaatcgtaccggcatcttcatgcagcggcgttcgctgccctcgacgatgggcctttcgggcgtcacgccctacggcaatctgggtgaggtggagaaccgcggcgtcgatgtttcgctcgaatacaacaaggcgttcaacaaggacctgctggtctccgtgcgcggaacgttcacctatgcgcacaacgaggtgaaggcccgcgacgaggcgaaatacctgcccaacaaatacaactccgtgctgggcaaacccgtcaattcggtttacggactggtcgccgacggccttttcgcctcgcaggaggagatcgacaactcgccccggcagaccttcatgcccgattatctgccgggcgacatcaaataccgcgacatgaacggcgacggcgtgatcgacgccaacgaccgcacgtcgctgggttatcccaccgtgcccgagatcatgtacggcttcggcgcctcggtcaactacaaacgctgggacttctcgttcttcttccagggcacggcgcgcgtctcgctgcgcatgtacgacatgcatccgttccgcgacaatcagtattcgggcttcaacatgacgcagtacgttgccgacgaccactggtcggaagccgatcccaatcccaatgccgcctatccgcgcctggattaccgctacaacgccaacaacacgcagacctcgtcgttctggatcaagaacggcagctacctgcgcctgaagagcgtcgaactgggtttcacgtacaaaagcctgcgcgcctatctggccggcacgaatctgttcatcatttcgcccttcaaatactgggaccccgaaatgggaagcggcaacggcttgaaatacccgttgcagcgcgtggtgaaactcggccttcagtataacttctaaaattcgagcgacatgaaaaaaatcatatccattttgctgtttgcgtgcgccggagcgcttgccgcgtgcgatttcctcgacgtggttcccgaggggcaggcgacgcaggaggacatcttcaaaacctccaaggaggcccgcaagtacctcaatacgctctacacctacgcccccaacatcgcggcctaccgctacatgcccgacttctgcgccggcgacgacattatcaccgccaccaacggccagacccgttatttcccctacaagagcatgctctacaacgaggagaacgccagccagacctactacggtctgtgggacgcgacgacctcttccccgtccggacgcacgaactacgacatgtacaagggcatccgctactgtaacattatgatcgacaatatcgacgcagtcccgggcatctcgccgtccgtggccgacgagttcaagggcgaagcctattttctgatcgcctattaccactgggtgctgctgactcactacggcccggtcatcctcgtcagggggcagctggacatggggcttcccgaggagcaggtctatgtggcccgcagtccgttcgacgaatgcgtgacgttcatcgccgagacctacgaccgcgcggccgatttgctgcacgggtatccgacgcgtcccgatgccgacctggggcgcgccacctcggtggcggccaaggcgatgaaggcccggctgctgctctatgccgccagtccgctctgcaacggcaacacggagttctacgcgcgtttccgcaacaacgacggcacgccgctgatgagccagacctacaatcccgaaaagtggaagtgggcgctcgacgcctgccaggaagcgatcacgctggccgaggacaacggacacaggctctacgaaagcccgaacgcgactgcggctgcaaccgctgccgagcgcggcgagatcaactaccacgactgcttcgtcgaaccgctctggaacacgaccgagtacctttgggcaatgggcgaccagaccggcatcgagcacttgcagcgttacggaggcgcgcgcctgaagctgccgtacagtaccgacggcttctgcatcaacatcgttccgacgttcgagtgcgtggagatgtactacacgcacaacggcctgccgtgggaccgagaccccgagaccatgcatatcgacccctatgcctataatgccgaaaaggagactgccaacctccatgtctacaaggagccgcgcttctatgcgtcggtgggctacgaccgcggcaagtacgccatcaacggcgaggagttcattctcaaatgccgcgccggcgagatgcagggcagtgtgctcgacgcctcgaaggagtaccagagctgtacgggctacattctcaagaagtggattcaccgccagtcggccttcaactacgacaccaagtcgtggacctaccgcaagtacgcctatccttacatccgccttgcggaactctacctgagctatgccgaggctgatttcgaatacaacgggtcgttgagcgacgcgagcctcaattacctgaatctggtccgccgccgctcggggctgcccgatttcaaggattcgtgggccttggccgggggcattcccaccggcgacgaactgcgcaaggtgctgcaccgggagcgttcgatcgaactgctgatggagggcatgcgctaccacgacctgcgccgttggaaagaggcgggcgaagcgatgtcccggcgtcccaaggcgtggaatctcgacggcaggacggcggccgatttctaccgggtctccacgatgaaggagagcggcgtccgcacgttcgaatcccccaagacctactggatggccattccgttgagcgaaatcaatatcaactacaacctcgtgcagaatcccggttactaaccttaataatccgattgcgatgaagaatcttgcgatatgcctcctgcttctgctgggagccgtagggtgcggcgacgattacgtcgtctacgagacggcggacactatggtctgcatcccgaagaacgatttccaggtcctcgaatacgatgccgcttcgggccaggcgtgcgtttacgatctctatctttacaagggcggttacaatgacgacggaatcaccgtgaaactggtggtcgacccctccgtgctcgatgtctataacgtggaaaacggactcgaactgaaggtgatgcccgacaggtatttcgccttcgaccccgaagtgcgcttgtcgggggacagggtcatggaccgtgccgaaatccgcttcgatgccgcttcgatgcttgccgacggcattgattcctcctatgtgctgccgctttccgtcagggccgatgatcagggcaaggtgcgtcccgaaaagaacagcgtaatcatccgggtcgtgatgaaataaccgtgatgcggaggaggtccggcctcctccgcatcctcaatgcaaaaaaatatgtcaaaattctacatacggcttctgtcggtgtgcctcgccgcccttgtcctggcggcctgctcctcctcggagggcggcggtgacgacggcccgaccgccggacagattcccgataaggccggaatgacggtgaagggaatcgtgaaggacagcgccggcaatggcattgccggggtggtggtgagcgacggcctggaggtgacggcgaccgacgaacgggggatttactatctggcctccgacctcgcgcggcgcaatttcgtctttgtctccgtgcctgccgactgcgagatccccgccacgcagggctgtccgcggttctaccgcaaaatcgaccgcaaacaggccgtcaaccgggccgattttacgctgacacgacgcaagactccgtccgaccgccattcgctgatcgttatggccgacattcagctggctgccgataacacgtcggtggattcctatctcggtcatgtcgttcccgatgtgctgaaaaccgtgcaggggcttccgacggaggtttacggagtcagtctgggcgacctggtctggaacgatatgtcgcttttcccgaagtaccgtcaggggctggagacgcttggtttcacgaccttcagcctgccgggcaaccacgatcacgatccggccgagttgaccgattcgctcgccttgcagagctacgaacgctatttcggtccggcgaactactcggtgaacatcgggaaaatccattatctgttcctcgacaacatccttttcgaccatgcgccgaccgccgaagaggagtatacgatcggtcttacggacgaaatttgccgttggatcgaagccgatttgcgctacgttccggcgggcagcacgctcgtcgtctcgtcccattgcccgattctctatcacacgaagaacaccgcagcgcgcaaccaccgcaatttccagcgtttcctcgatgcgataagcccctataaggtccatgccttcggggggcacaagcactaccatgacatttaccgttacgacgacggacgcaaggtcatgcactgcatcgcccgcacgccgggcgacctgttcatcaacggcgacgtcaactgcgacggcacgccgcgcggctatgccgtggtcgaggtcgatggcgaacggctctcgtggtattacaagccggcgggcgggaagcgcgatatgcagatgcgcctctatgcacccggacgcaccaattcggcctgtgtctatgccaatgtctggggttatgacacggcctggagcgccgtggagtggattcccgcttcgggcgggcaggcggtggcgatggagcggacgcagcgcaccgatccctattacgaggaggtgctggcgacgggtgtgcgcggagggacgccgaccaatacgtggcatatgttccgggtcgatccgggcagcgagcggggcggcatggtgcgggtcaccgacagtttcgggcatacctacgaatcgtccgtgtcctggtaaatacgacattcgaacaaaaccttaaatacaacttcaacgatgaagagactttttctttttctgaccgtcgcggcagccgtttgctgtgcggcgtgcagcgacgatcccgaggtcgccgaatccaacctttcactgctcgaggataacgtgacgttcgatatgttcggagggcgcagcgtccttgaaatcacggccgattcgccgtggacggtctcctgcgacgacgattggtgccgcaccaacgtcgccgaaggttcgcacacgaagaagatcgttctgacggtcgaccagagtttccagcccgaggagcgcacgaccgcggtgcgtttttacgccgcgggcgaagagaagcacaccgtgaccgtgacgcaggagaagttcgagccgatcctcgtgctggcggagaacggcgccgatataaccgtctacggcgccgggagcgaaccggccctgaacctgcgtgcatccgtggcatggaaaatcgagggtgcgaccgactggtgcgccgtgtcgcagtccgaagggacgaaaagttcggtcgtgaaactgttgctgaccgacgacggcgagggcgtgcgtccgcgcagcgcgacgctgaccgtctcctccgaaatggagggcgtcgaaccgcagcaggtgaccgtcgtgcagcggtcgaccggagcgaatacggtcgtggtccgggcgggtgaaacccgtgcgtttccggcgcggcgcaccgacggcgcgtatgtgaagggcgttgcggcggactgggtctggaccaccgacgcagagttgctttcggggcttgactacgacgcttcccggaatgaaatcacctgcactgcggccaagtcgaagcagggcagcgggctggtcgcgctgttcgacgccggaggcgcggttgtctggtcgtggctggtctgggtcgtggacaagatgccttcggacgtgaccgtcggcggtatcgcctggcaggaccgcaatgtcggggccgaataccattcgaccgacccgaaggcctgtgtgcaggatttccgctcctacggactgttctatcagtggggccgcaaggagccgttcatcggcgcgaagatcctctcgaagaacaaatattacgagggacatgcggagtatcccgatgctttcggcgcgatgacgcgcgaggtggttttcaacgcctcccgcaccgccggctggcagatcagcggcgaggagatgaccgccgcaacggcaaacggcaatccgacgacgttctatacccggtcgtccgcagcgatgtccgaaggctggaccgagggcggcaaggggctgaacgatccctgcccggtgggataccgggtgccgacggcggccgaatggcagtcgctgcttgcctacgtggacggcaacgccgccaagaaccaggattcgggcgacacgtacagccgctggtatgcgctcaattcgggcggaaccctcatcggcccgtcgacgatgttccgcaagggcgataacggccgcatccactatccggggcgttcggcagcctattgttcgtcgacgctcgccggcggcaagccgctcccgatgtacgactggaaggcgggcgacgccacgggcgaggggacctattacgaacggaagatgaccacagcctacggcatgcgctgcgtgaaggagtgacgccgctgcgatcgcgggggcttcgggcgggagtgagtttattccgtccgaggccctttttttgcggtattttcattaccttcgcatgtcttttcaaacttttaccgatgaaaaatagcatctttaccgtattggcggccctcgtgctgtatcccgccggggcgcagcccgtcaccccgcaggaccggcggcgcgccgcggaactggtcgaacgcatgacgctcgacgaaaagatcggccagctggtccagcagcgcggaggcggcgccgtcacgggacccgacaagacggaactttccgtcgaacggctggtccgcgaagggcgctgcggcagcgtattcaacatcaagtccttcgaggagaccgagcggttgcagcggatcgccgtcgaggagagccggctgggcatcccgctgctgatcggcgccgacgtgatccacggtttccggacgatcttcccgatcaacctcgccgtcgccgcctcgtgggatcctgccgctgcggagtcgctggcccgcgtttcggcccgcgaagcctcggccatgggcatccattggaccttttcgccgatgtgcgacgtttcgcgcgacccccggtggggtcgtgtctccgagggcgcgggcgaagacccctatctgggcgcgcgtgtcgccgaagcgatggtgcggggctatcagggcgacttgtccgacccctcgtcggtccttgcctgcgtgaagcatttcgccgcctacggcgctccgcaggccgggcgcgaataccatgcggtcgatatgtccgagcgggttttccgcgacagctacctgccgccttaccgggcggcgctcgatgccggggccgcgacggtgatgacctcgttcaacgacctcgacggcgttccggccacggctaaccgctggctgatgcgcgacctgctgcgcgacgaactgggcttcggcggattcgtggtgaccgactacggcacgatcggcgaactgaaagctcacggcgtggcgggcgacgatgcgcaggctgccgaactggccctgcgcgccggggtcaacatggacatgatgagcgccgcctacctgttccatgccgccgaactggtgcgggaggggcgtatcccggagtcgctgatcgacagcctttgccgcgaggtgctggccgtgaagttccgcctggggctgttcgacgatcctttccgctaccaggcgaaggagcgcgagaagtgctattacgccccggaacatctcgatgccgcgcgtcgcgtggcccgcagttcgatggtgctgctggagaagcgcggcggcgtgctgcccctgaaaaaggggagccggatcgcgctggtgggacctttcgccgattcccggtgggacctgatcggctcgtgggttcatttcgccgaggccggccggacttcgacctttctcgacggattgcgggcgcgtttcggagccgaccgtgtgacctatgcccgcggatgcgacccgcacaaggccctcgaaggcggtatttcggaggcggtggccgcagccgcgaagtcggacgtggtgctggtcgcgctcggattgaaggcgggggagagcggcgaggcggcaagccttgcgtcgcttgcgctgcccgacgcgcagcgtgacctgctggagagcttgaagcaaaccgggaaaccgattgtcgtcctgctggttacggggcgtcctatggagctgacccgcgaagcggaacttgccgacgccctgctgctgacctggtatccgggcacgatggcgggcgaggcgctggccgatgtcgtgtcgggcgactacaacccttcggggcgtttgccgatgacctttccccgcacggtggggcaggttccgatccattacgacatgaagagcacgggacgtccggccgacgagtcgggcaagcccaacaaatacacttcgcgctatctcgacgtacccaattcgccgcagtattgtttcggctacgggttgagctacacgacgttcggttattcggacctgcgggtgctgacgcccgaaaccgccgtcggcggcgaggttcgcgtgtcggtccgcgtgaccaacacgggcggccgcgacggcgaggaggtcgtgcagctctacgtgcgcgatctgctgtccggtgtgacgcgtccggttcgtgaactgaaaggtttccggaaggtcatgcttcgcgccggggagagccgcgaggtgaccttcacgctgacgcccgacgacctttcgttctggcgtctcgacaaaaagtggggccaggagccgggcgactaccatgtctgggtagggcacgactccgactgcacgctcggcggcagtttccggatcaccgaatgattcgtctctccggcacggcggccgacgccgcgggtgcgggacagctgcaagggagcagcggcttcggccgccgctcccttttccgtgcccggcgggacggtccggatgtcccggaaaaacccgttcggagatgtttcggacaaaaggttccggggaatggctgggctttcgcaaattttttctacctttggaggtcaaaacagtacgcaatgatggatttgaagacgatacgtgccgaactgcgcaagctgaccgcgattgtcgacggctgggagccttccggggagattccggccctcgaacgcgacctggcgctggaaaaactgcggacgctctacgatgcggtgcgctttacggaggtggaatcccttccggaattcccggttgcggagacggagcctgcggcggctccggtgcccatcgacctcggggcggtgctttcgctcgacccgacggacgaagccgtgttcgaacccggtcccgatgccgtttccggacccgcgttcgatgcggaggcggaacccgcagagccgttttccgaacccgatacgacggtcgcggccgattctgccggggcgtttgccggggggaatcccgatacggagacgcccggaatggcggagcctgcggcgtcggattccgagccggaacttgagggggaatccggatttgagcctgatcccgaagcggcgtccgaagccgcattcgtcgccggagaatccgaaccggccgccgaatccggaccggtcgcagcatccgaatccgaggccatgcccgaaccgtctgcgaagccggtcgctgcgcctgaatccgaggctgcggctgaaccgtctgcgaagccggtcgctgcgcccggacctgccgctgcggctgaaccggtcgtcgttccggaacccgctcctgcggagaaaccccaatatatcgcgcccacgctgttcgggctggaggaggagaccgtccgccaccgtcacaaacagcgcgtcatcatgtcgctctacgatacgcctgcgcccgccgaaaagcccgcaaggcccgaaacggcggaaagaccggcggagcctcccgaacccgctgcccgtcccgaacctgctgtgacgctcgaacccgctgcccgtcccgaacccgctgcgacgcccggaccgactgtccgtcccgggtttgccgcgactcccgaaccggcggctgcgcctgcgtccgcaggtcccgggccgcagtccggaatgtccgtgccgcagtccgcggcggaacccgtcaccgtttcggaagcgcctgccgccgccgagccggaggaggccgaatccggagcgagggaggttgcggtccctgtcggggccgtgctgggcgaggtgatcaaccacgacgtgcagacgctggccgacacgatcgctccgcggcgcgacatggcttcggaactgcgccgcggcgaaccggtcgccgaccttcgcaacgccatcggcatcaacgacaagttcctgctgatccgcgatctgttcggcggcgacggcgaagcctatgaagaggcgatcgcgacgctcaacgccttcgacgatttcgacgagtgcatgatccacatcgccgagaactacgcctggaatcccaattcggacggtgcgaagtttatgatggaactgctcgaacgcaaattcgcctgacacgatggccaaactctatatcgtacctacgccgatcgggaatctggacgacatcacgctgcgcgcagtgaacgtcctgcgcgaggtggatttcatcctcgccgaggacacgcgcacgacgtcgttcctgctgaagcacctcggcatcgagcagaaactccgttcgcaccacaagttcaacgagcacgccacggtcgaaatggttgccggggcgatcgccgcgggacgcaatgccgccctggtgtcggacgccgggacgcccggcatttcggaccccgggttcctgttggtgcgcacgtgcgtcgaggcggggatcgaggtcgagacgctgcccggcgccacggcgctgattccggcgctggtgcagagcgggtttccgtgcgaccgtttctgcttcgagggcttcctgccccagaagaaggggcggatgaagcagttgcaggcgcttgccggcgaggagcgcacgatgattttttacgaatcgccctaccgcgtggtccggtgtctcgagcagttcgccgaggttttcggcgaagaccgccgggtttcggtgtcgcgcgagatcaccaagaagttcgagcagaccgtgcgcggaaccgtcgccgaggcgctcgggcatttccgcacgaccgaacccaagggcgagttcgtgatcgtcgtggccggaaagcccaaagtccgccgcgtccgggaggacggggaggagtaactcaaatcgaaacgcattgatggaagagaaccgtacagacgatacacaaaaggtaaaacgttcgttttcggcgtggctcggggagctgcgcgaatttatgaagggccgtttcagcctcgacgaggacaaggcgcagcgcgacgaggtcgtggcctccgtctcgaagggcgtggagttccgcggcgtcaacctctgggtgctgatcttcgccacgatgatcgcctcgctgggcctgaacgtcaattcggccgcggtgatcatcggcgcgatgctcatttcgccgatcatgggcccgatcatgggtgtcggccttgcgctgggcatcaacgatttcgaactgctcaagaagtcgctgcgcaacctggcgctgatgttcatcgtcgccatcatcacctcgacggtctatttcttcatctcgccgctctcgtcgaacagcagcgagctgctggcgcgtaccgtgcctacgacctacgacgtgctgatcgccctgttcggcggcctggcgggcatcgtggcgcagacgcggcaggaccgcacgtcgaccgtcattcccggcgtggccatcgccacggccctcatcccgcccctctgtacggcgggcttcggactggccacggggcagttccgctttttcatcggcgccttctacctcttcttcatcaattcggtgttcatcgcgctggcgacctatgccatggtgcgttttctgcaatacgagaagaaggtcttcatcgacaaggtccgcgagcgcacggtcaagcggctgatgatggtcatcacgctggtgaccttcatcccgagcgtcgtcatcgggttccacatggtccgcgtctcgttgttcgaggccgtggccgacaaatacgtgtcgcaggtcttcaactttccgcatacccgcgtgatcgagtgcaacaaacactacgcgcagggcaagaacccctcgcagatcgagctgctgctcgtgggcgagccgctgggcgaggaggtgatcgagaatgcccgtacgcagatgcgcaatttcgggctggaggaggccgaactggtcgtccggcaggccaatacggaggacaaggtcgacgtggtttcgctccagaagagctatcaggagctgctggaggagaagaaccgccggatcggcgagatgtcctcgcagctgaaacgctaccgggtgaccaacgtcgaggtgaacgacatctcgcgcgaagtgggggccatgatggacaacatcggggccatttcgctgaccaagggcatcaccttcgacgtcgagggcacgcccggcgatacgacgctcgtgtgcgtggtgacgccccgggattccgcgcttccggtcgaccgtgaaacgctgatccgctggttgagaatccgcaccaaggtcgagaacgtcaaacttttcgtggaaccctaatccgggcggcaggcatgaaacgaaccgatctgaccattttgcagcgcttctggctggagaccctttggctgggcgcacgcgtgttcgccgtgatgccttactggttcaagtactacgtcgtcgaaaacctgcttttcgtcctgctctactactgcctgcgctaccgcatgaaggtcgtcaagaccaacctgcggaactcgttccccgagaagagcgaacgcgaactggccgtcatccggcggcggttctaccgcacgctgtccgaaatcttcgtcgacacgatcaacatggcctacatgaacgaggagaaggggcggacggtgcttacggtcaaagacgtggagaaacacgtggaagcggtgcacggccgcgactggatcgccatgacggcccatttcggctgctgggagtactgctcctactgggggctttacgagcggtcgcagatgctggtcgccgtctaccatccgctgcgcagcaaggtgatggaggaactctaccggcggctgcgcaattacgaaaattcgatgaccgtctcgatgaaggagagcctgcgtttctacctgcgcaaccggaccggaggcatcgccggcaagaacctcgtgatggggcttatcgccgaccagaatcccccgcggcggcccgacagccgttggttccgcttcctcaatcaggatacgatcttcttcgacggcggcgagaaactggccctgcgctgcaacctcccggtctacttcgtgaagatgaaccgcctgcggcggggacgctacgaaatgtccttcgaactgatttatgacggcaaagaggaggtcgccgaatacgaaatcacgcagcgttacgttcgtaagttggagcggatgatctgcgagtgtcccgaactgtggatgtggtcgcatcgccgctggaagcacaaacgaactcatgccggtcgctaaaattatcatactcaactggaacggtgcggaccacctgcgtcgtttcctgccgtcggtcgtggccgcggctcccgccggcgtcgaggtcatcgtcgccgacaacggttcgacggacgactctcttgcggcgctcgccgccgggtttccgtcggtcacggtcctgcgcatggaccgcaactacggctttgccggaggctacaaccgcgcattggagtatatcgaggccgattattacctgctgctgaactccgatgtcgagacccccgaggggtggcttgcgccgattctcgactgtctggaccggaatcccgacgtggcggtcgccgcgccgaagctgatctcctgcgccgaccgcacggagttcgagtatgcgggggctgcgggcggtttcatcgactacctgggctatcccttctgccgggggcgcatcctgcgctgcgtggagaaggaccggggccagtacgacgacgagcgcgacgtgttctgggtgagcggcgcggctttctgctgccgggccgacgtgttccgtgcgctgggcggcttcgacggcgatttcttcgcccacatggaggagatcgacctctgctggcggatgcagctggcgggttaccgggtgcggatcgtgccacggagcagggtctaccacctgggcggcggcacgctccagaccgattctccggccaaggtcttctacaatcaccggaacaatctcgccatgctttacaagtgcgcctcgcccgcacagcggctttgcgtggccgtcgcgcgcccggcgctcgacctgctcgccgcgctgtcctacctcatgcagggccgccggaacaacttccgcgccgtgttccgcgcctggcgcgacttcatccgctggcacggggcgctggcccgcaaacggcgtgagatccgcgcgaaccgcaagggttccgccgcggaaaacatctaccgcggctcggtggtgctgcgctaccttttcggccggcggaccttcggcggcatgatgcgctgacgcggagccgatgtcgtcgttttcgcaacgggacttgtgcgatcttcgttttttgcgtatctttctgaaaaataccctcgcttatgatacgtgcggctcttctgctgtcggcagtcgtgtgttttttgcagccttttcgcgcgtcggcgacagggcaggctgccgaacggcttgtcgtcgggcgcgatacgatgcagttgttcgcactgccgctggcgacggcggattccgccgtgctcgcccggctcgaaaaacggctggacgaactcgatgcctccggctctacggcttgctggcgtcggtgtatcggtgtctggcggctggacgacgagggcatcttgtggcttgagtgcgtgaacaccgaggacggcgacgtcgtattttccggagcggagctggttcccgaatttgcagcgggatcacgcgcccgtgccggctggttcagcggagagatccgctatggcacggggaatctggtgtattaccaacacgatggatttatgcggaatctcgaacgcgaatgattccacagggcgggtggttcggatcgaccgggcgcgactgttgtcggaaaagggaagtcctgttgtcagcgatccggctgacccgctgttgcaggcagctctgcgggcgtttcgctcggtgtcgcgctgggatgcctggtgggtcggaggggcctggaaggaacaggcgtattttattccgctgcgcagggccggaatggtttggaaaccgcgaagaggataacgatgcttattgctccggcttgcagggaagcgtgaaccagaaggtcgagcctttgcccggtcgggattcgacgccgatgcggccgcccatcgtttcgacgatcgacttcgagatcgccagtccgatgccgatgccctgcctgaacgatcccgccttgacgaaacgttggaaaagctgtccccggtgttcttcggggatgccggctcccgtgtcggcgacgtagacgtagagttccccgccgcggatttcgaacccgaaatcgacggagccttcggaggtgaatttcacggcgttgctcaaaaggttggcgatcacctgaatcagccgtttgcggtccgtgcggatgtagcggacgggatattttctgtggaaggtgatccgcaccgggctgttctccggctgccgcatgcggaaaccgccttgcagctcttccatgacggcattgagttccacgtcggtatattcgtagccgagggttccggcctcgatcttcgagagatcgaggatgtcgcagagttgctgtatcagtacctcgccgttggagcggatgatgcgcatgtactcctgtttctcggtcgggtcggggtcgtccatgagcagttccgagaatccgatgatggcgttcagcggcgtgcgcagttcgtggctcatgttggccagaaagagcgatttcatgcggtcggactcttcggcgcgaacgcgggctttctccagttcgcgctgggtgcgtttctgggccgagatgtcgctcacggtcagcaccacccggggttgtcctgcgacggtgaggaaattgcccgccacgcttacgtcgcagtcgatggtctccgtgtggtcgtcggaggtgtagagcaccatcgggacctccagtcccgagaagcctttcttcgtccggaacaccccggtgatggccgcgcggacgggacagtcggcgcacaattcgtgtgtgccgcagatgccggcgtcctcgccgttcttgcagcgcagctggttgcccaccttgggcggtgcggctttcggagcggttcccgtcgtggagcggtagttggtttgcagaacgttgaaatcggggtcgatcagcagcaggtaggcggctacgttgcggaatatgcagtcgttgatccggtcgcttgttcggatgtaccggcgctggtagcagatacggacggccaggaggacgcaaaacgccgccagcacccctgttcctattacgtataacaactgcatccgattattccgttttcgtttccgatcccaaaggtaggtaaaatccggtgaaataggagggtaaatgataaaaaaagacatccggaatcgtccggatgtctttttttgtcggtgggggatctttctatttgttgatcttggcccacgagtccttgagcgtcaccgtgcggttgaacaccagatgaccgggggtcgagtcggtgtcggggcagaagtagcccacgcgctcgaactgtacggcccggcctacggggatgtcgcgcagcgacggttcgaggtagcctgtgattttgatcattgattcgggattgaggttgtcctcccaggtctgcccttcggccacgtcgtcggggtcctccttcgtgaagagcgggttgaacagccggatttcggcctccacggcatccgcggccgacacccagtggatgacgcctttcacgcggcggccgtcgctcgacgaacctccgcccgacatcggatcgtaggtgcagcgcagttcggtgatgttgcccccctcgtccttgacgacctcctcgcacttgatgaggtacgaatagcgcaggcgcacctcgccgcccggcgagaggcggaagaacttcttgggcggattctccatgaagtcgtcgcgctcgatccagatcaccttcgagaagggaacctgccgcgtgccggcggcttcgtcctcggggttgttgatcgccgtgaacagctcggttttgtcctcctcgtagttcgtgatgaccaccttcagcggattcagcacggccatgcggcgctgggcgacccggttcaggtcttcgcgcacgcagtattccagcttcccgaggtcgatcacgttgtcgcgcttggcgacgcccaccatctcggcgaagttgcgcaccgaggcgggcgtgtagcccttgcggcgcagggcgcagatcgtcggcatgcggggatcgtcccagcccatcacggcgccctcctgcacgagcttcaacagcttgcgcttcgacatcatcgtataggtgaggttcaggcgtgcgaactcgtactggtgcgaggggaaaatgtcgagcgcctggatgaaccagtcgtacagcggacggtgcacgtcgaattccagggtgcagatcgagtgggtgatccgctcgatcgagtcgctctggccgtgggcgtagtcgtacatcgggtagatgcaccatttatcgcccgtgcggtgatgctcggcgtggatgatgcggtacatgatcgggtcgcggaacagcatgttcggatgggccatgtcgatcttggcgcgcagcaccttggctccgtcggggaactcgccgttcttcattctcgtgaacaaatcgaggttttcctccaccgaacggtcgcgccacggcgagggcgttcccggcacggacaccgtaccgcggttttcgcggatctcgtcctgcgtctggtcgtcgacgtaggccagccccttcttgatcagtacgacggcccattcgtagagctggtcgaaatagtccgacgcgtaacgctccagctcccactggaagccgagccactggatgtcgcgcttgatcgagtcgacgtactccacgtcctccttgacggggttcgtgtcgtcgaagcgcaggttacacttgccgccgtatttcttcgccagtccgaagttgatgcagatgctcttggcgtggccgatatgcaggtaaccgttcggttcgggcgggaaacgggtctgtatgcgcgtttcgcccccggcgatcgactcttcgatgatctcttcgaggaagttcagcgacttctcccgtgtttcgtttgtttcgcttgccatattattttttatgattcttgctgttgtaaacggttttgagcagtttcacccccacgaccagcatctgctgggttcccagggccgtgccgtcgtggtgggcggcgaactccgcgcggaccgagaccgtgtcgtcgaagaacgagcggcggtaggagagcgccgtgcggctgtacaccttctggtcggtgcggaagaaactctcggcggggtacaactcgcggccgtaggggagcggtgtgccgtcttcgagttcatgtccgtagaagaaggggtggatgttgtcgccgacatagaggcgttcgtcgagcgacagtccccagcggctgatccggaaggcgaactcgcccatgcagggcttttcccacgagtggccgaaactgcggtcgcgctgggccgtgagcaaagctcccagtttgatgtcgaaatcgaagaaggcgttgaaccgcacgccgacgcaggggttgagcagttgcaggtcgacgacgttttcgatcggcgcgccctgctgtcccgcatagtggaacatcgagtagttgaacccatagtagaacgtgtcgaggtagtggcgtccggcgagcaggatgcggaacttttcgcgcgagagggtcgagtacatgccctcccagtcgcagacgaactcgacgtaggagttcctttttccgttgtactgcgccagcacgccgttcatgcggttgtggaagaagcgttccgactcggagaagaatgccgtcgaatagtcgtcgtcgtgcatcatgtcgcgcgtgaagataccggccgcggccgtcaccttgggcgtctggaactggtagtagaagacgggtttgatctccgaaagataggccgattcctgggttccgaaattcttgatcatgtccgcggcgatgaccagcgtgtttttctcgtcccaccggatgccgacacggggcgtcagccgggccgcgaagtccgtgcccgattcgatgtccagtcccggcacggcgaactcgttgctgccgaattccttgttgtcgaaatacattttgaaatcggttcccagcagaatctcctgtgcgtgtcctgcggcgacgcatccggaaagggcgagcaagagtaaaagttttttcataggtgtcaacggaatatagctgacaaaagtaaggaaaagattttaattttatttacttttgcccccgaaatcaatcgttccgaacccattatgcgcaaaatcaccaacgaagaactcggcaggccttcggccgaggagttcgccgcgatggaaaagatgcctgtcacggtggtgctggacaacgttcgttcggcccagaacgtcggggcctttttccgcacgggcgacgctttcgccgtggagcggatcgtcctgtgcggcatcaccgccactccgcccagccgtgacatccacaaaacggctctgggggccgagatgaccgtgtcctggagttattgcgcttcgaccgtcgggtgcattgcgcagctgcgtgccgaaggatatgcggtctacgccgtggagcaggtcgagggggccgtgatgctcgatgagtttcgtgccgtgccgggggtgaagtatgcgctcgtcttcggcaacgaggtcgacggcgtggggcaggaggccgtcgatcggtgcgacggggccgtcgaaatcccgcaggccgggaccaagcattcggtcaacgtctcggtgtcgggcggcgtcgttttatggagtttcttttgccaaatccgtccgaagcgttaactttgccgcgttgtaaaacttaaaatctgaaaaaatgtcagtagaaagcaccgtccgcgcggtaacgacttaccgcctgacggagatgaaacagcggggcgagaagatcgccatgctcacctcttacgactattcgatggcgaagatcgtcgatgccgcgggtatcgacgtgattctcgtgggcgactcggccgccaacgtgatggccggttacgagaccacggttcccatcaccctcgatatgatgatctaccacgcccgttcggtcgtgcgtgccgtggagcgggcgctggtcgtcgtcgacctgccgttcggaacctatcagggcaactcgaaggtggcgctcgattcggccatccgcattatgaaggagaccgaggccgacgccgtgaagatggagggcggcgaggagatcctcgaatcggtccagcgcattctctcggccggcattcccgtcatgggacacctcggcctgacgccccagtcgatccacaagttcggaacctacgccgtccgcgccaaggaagaggccgaggccgaaaaactgctgcgcgacgcgcacctgctgagcgaggcgggctgtttcggcatcgtgctcgaaaagattcccgcggcgctggccgcgcgcgtgaccgccgagattccgaccccgacgatcggcatcggcgccggcgcgggctgcgacggccaggtgctcgtgatccacgacatgctgggtatcaacaaagggttctcgccgcgcttcctgcgccgctacgccgacctgcacacggtgatgaccggtgccgtggagcagtatgtcagggatgtgaaggagtgcgatttccccaacgaaaaggagcagtattagtccctgattccttatacacgcaagccccggctggaacatttcagccggggcttgcgttgcagaaggctaaagaaggctatttgatcgtcttgtgcagggcctcgtagaaatcgggtccttcgcccgcgtattttccgatgatgaggccgtcgggaccgatgatcaccttggtggggtatccgctgacagcatattcgacggagatgtcttccgctgccggaacgtctttcggattgtagacgttgatccacggcagccggtgttcttcgaccgcggcgagccatctctccggagtgtcgttgcagtcgacgccgactatttccagtttgcttttataacggtcgtagtatctcttcatcttcgggattcctttgatgcaccatccgcaccagctgccccaaaagtcgagcacgacatactttccgcgaagcgacgagagggtgaaattcttatcgtcggcggttttcagcgtgaagtccggagcggggctgccggcgacgatcttcgcttcggccagccggatcaggcggtattttccggctttggccagcagcggttcgagcaatggcctaaatatcgagttgcgggccgcatcggcgagtcgttcgtggtatgttaaaacgctgtcgatgggtattttcgtcaggcagtaccctgcgagcgggttgtccggattggcgtcgatgtagtccatttcgcaagcccggcggcgggccatcacctgccggaaccgctcgtagagcgcttcctgttccgcgcggctttttccggccatggcatcctgcaatcgctggccttcgatccagaaggaccgcaattcctgataatggcggctgtgatcttcgttgagacgtgtgcccgaaagcgtgcagttgaaaaccgtcgagtcgatccggccccggagtacggcgtgttcgcccttgtcgaggaataatttcatgtccgaagtgctggtcgaatggcgtcttccctgatcgaattccatgagctgcatggggatgatgatgaattgtgtcggccgctcgacaggcgtgtcgtatgcaaatcgcccgttggcggcgacgatcgtgtcgtaggtgatccgttggtcgtcatctcctttgagaccgggcatatcttcgatcgcgcagtgcacgatgcagagtgaatcgttggtcaggttgtcgatatgccccgtgatcgtatgtcggggtgcgcagccggcgatggcggccgcaagcaggaggagcaggtctcttttcatttcggaatggtgggtcgattctgcatttaaagatagcacaaaaagtcttccgccgaacctattgatagaatgttgataaaaaaaccggcggataggtccggaaattaggccgtttcgaaaaaaaacactacatttgcgagcaacaaaaatccacgttcattatgtcttttatcaatgaaagggttcagcccgagggacttaccttcgacgatgtgctgcttatacccgcctattcggaagtgttgccgcgagaggtcaatgttcagacccgtttctcgcgaaatatctctctcaacatccccattgtgtccgccgccatggacacggtaaccgaagcgccgctggccatcgccctggcgcgggaaggaggaatcggcgtgatccacaagaacatgaccatcgccgagcaggccgcgcaggtccgcaaggtgaagcgcgccgagaacggcatgatctacgatccggtgaccatttccaaggaccacaccgtcggcgacgcgctgaacctgatgaaagagaacaagatcggaggcattccggtcgtggatgcggacaggatgcttatcggcatcgtcaccaaccgcgacctgcgtttccagcgcgacatgtcgcgccgcatcgaggaggtgatgacgcccggcgaccgcctcgtgacgacgcacaatcccgaactctcccacgcccaggaaatactgctcaacagcaagatcgaaaagctccccgtggtggacgacgcaggccgtctggtggggctgatcacttataaggacatcaccaaggtgcaggatcaccccaatgcctgcaaggacgcgaagggccgcctgcgcgtggcggccggcgtcggcgttacgcccgacgcgatggaccgcgtgaaggcgctggtcgccgaggacgtcgacgccgtggtgctcgactcggcgcacggccattcggccaacatcgtttcgatgctcaagcggatcaaggaggtttatccgtcgctcgacgtggtggtgggcaacatcgccacgggcggggccgcgcgctacctgatcgagaacggcgccgacggcgtgaaggtcggcatcggtcccggttcgatctgcacgacgcgcatcatcgcgggtgtgggcgttccccagctgacggccatctacgacgtggcctgcgtggcccgcgagagcggcgttccggtgatcgccgacggcggactgcgttattcgggcgatctggttaaggcgttggctgcgggcggcgactgcgtgatgatcggttcgatgttcgccggcacggaggaggctccgggcgagacgatcatcttcaacggccgcaagttcaagagctaccgcggcatgggttcgatcgacgccatgaaggccgggtcggccgaccgctatttccagaagggctgcgaaggcaacatcagcaagctcgttcccgaaggcatcgccgcgcgcgtgccgttcaagggctccctttccgagacggtttaccagctcatcggcggcgtccgttcgggcatgggctactgcggcgcgaaggacatcgagacgctcaaacaggcccggttcatccgcatcacggcttcgggcatgcaggagagccatccgcacgacgtagccatcacgagcgaggcgcccaactattcgagcgaacggtagatgggactcccggtttcgaaatacgactggtggattctggcggcggcgttcgcactgttcgccgcatggctgatcacccgccttccggtgctgcgtacgctggtccttgcggcggcgttgggttatcttctccggcgcgtgtgggtgggctatcgaaattttggaaagtaattgaacgactgatatggaaaaaatcctgattctcgacttcggatcgcagtacacgcagttgatcgcacgccgtgtccgcgaactgaacgtctattgcgaaatccaccccttcaacaaaattccggcgatagacgcgtcggtgcggggcgtgattctttcgggcagtcccttctccgtgcgggacgcacaggccccgactcccgacctttcggccatcaagggcaaactgccgctgctgggcgtctgctacggcgcgcagttcctcgcctcggctttcggcggcgaggtgcagcccgcgcccagccgcgaatacggccgtgcgatgctcaccgtgggcgacgcctcggatgcgctgatgcgcggccttccggcccgcacgcaggtgtggatgtcgcacggcgacaccattacgcgcgtgcccgacaactatgaactgatcgccagcaccgaggacgtgcgcgtcgccgccttccacgtcgggggcgagcagacgtggggcatccagttccaccccgaagtgtaccattcgaccgacggcacgcagctgctcaaaaacttcgtcgtggacatctgcggctgcgggcagtcgtggacctcggagggtttcgtggaggctaccgtgcgcgaactgcgcgagaagctgggcgacgacaaggtcgtgctggcgctttcgggcggcgtggattcgtcggtggcggccgtgctgctgcacaaggccatcggcaagaacctctactgcgtcttcgtcgactcgggcctgctgcgcaagaacgagttcggggaggtgctggagtcctataagcacatggggctgaacgtcaagggcgtgaatgcctcggccaagttcctgggcgatctggcgggcgttacggaccccgagcggaagcgcaagatcatcggccgcgacttcgtggaggttttcaacgaggaggccattcagatcaaggacgtcaagtggctggcgcagggtacgatctatccggatgtgatcgagtcgtgttcggtcaacggcccttcggccacgatcaagtcgcaccacaacgtcggcgggcttcccgagaagatgaacctgaagatcgtcgagccgctgcgcctgctgttcaaggacgaggtgcgccgcgtgggccgttcgatgggcatttccgaacagctgatcggccgccatcccttcccgggaccgggccttgcgatccgcattctgggcgacatcacgcccgagaaggtcgaaatcctccagaacgtcgacaaaatctatatcgactcgctgcgcgccgccgggctgtacgaccaggtgtggcaggcgggggctgtcctgcttccggtgaagagcgtcggcgtgatgggcgacgagcgcacctacgagggctgcgtggccctgcgcgccgtgacctccacggacggcatgacggccgactgggtgcacctgccctacgagttcctggccaacgtgtcgaacgacatcatcaacaaggtcaagggggtcaaccgcgtagtctacgacatctcctccaaaccgcccgcaaccatcgagtgggagtagggggattcccgttatgaaaaaggaccgcatccgcgggaaattcactgttgtaaacgaggtttcggtttccagaccgtcgcctcgtttgcttttgtttatatgcatcgttctgaactgcaatccgcagcgggcgtttcgcctattccgaccgtcgtcatggaaattccgaaagaggtctgcaacctcaaggaccgccgcagcgacctgtacgaggtgcgggtgaaaaaatgaaggacacggtgacgggcttgaaaacggggagcgcgtgcgggccttgattgtcggggcctgatgcggccgggcattatgccgcagtgtacgcgcattttttgtttaggacgggctatggaaaagccctgggggcgtgcccgatatgattgtttcgctgtaaacagcgtgcatggctttttgtgaattttcttgccgcatggctaaataatgagccggcgcagacggtagacgtaatggtctacggcatgcagtccggcagcgaaaccttttctgtgcacccttgcaacgagtccggcaacgcccgaaataccgtatgtgacgcaacacattgataaaaacgcagcacgcgagcgcccttgggctccgcgctggaacatggatacggacgtgcgtgcttcttcgcactcctgcaagacaccggtaagacttaaatcggaattatagacgtattcgcattgccattggtcggcaagtaaattcccccccccccccccacgggttaggaacgtttcattcgtgaatttccatggagcgtccggcctgttccccgactccttgcagagcaggcaggccatgaaaaccgttagcagtatgaataccgatttacgcattccgacaaactgaatccatatacaaaattaacggttcatacgggaccggcaaatttttcggcgatttatgccggaaacggagatgaatccgtccgaatgcagcatattgccgtatgcttcgatcggattctgttcgggaatgggcgagaaggcgagagactgcatgttgtcattcagtatgatgcgcaatgaaaggcaaaaaaagtaaacgaggcgacggcctggaaaccgaaacctcgtttacgatagtcaatagtgaactctccgcggatgcggtcctttcttgccgctgcggggttatttcaccgagacgggcagcgtggcggcgatgtcggccgacgaggttcccagcgaaagggtgtattcgcccgggttgaccttccagccgcgcgactgcgtgtcccagaacgccagcgcctgccggtcgagttcgaactccacgacggcgcttttgccgggggccagggtcactttccggaagcctttcagctcctttttcggccggaggaccgtcggggcgttctccgtgacgtagagctgcacgacctccgcgccctcgcggtcgcccgtgttggtcagcgtgacgctcaccttcagcggcttgtcggcggggaacaccttcggggcgcggggtttcgaaagctcgaacgtggtgtacgaaagtccgaatccgaaggggtagagcggtgcgatgcccttggtctcgtaccagcggtagccgaccagcaccgactccttgtagtcgatgtcgtagagctggatcaggcgttcgttgtaggcgcggggcgccttgttgtagaactccgcgccggcgggcatcgtgcctttggcgggggagtcgttgaactccttctcgatggtcatgggtagtttgcccgagggcgacagtttgcccgaaagaatgtcggccagcgccgtgaagccgctctggcccggataccagccgtagatcaccgccgcggctttgtcgttccagccgcccatgcggattcccgaacccgagttgaccagcacgatggtgttgggattggactcgacggccgtgcggatgaaggcctcctcctccttgggcagcgcgaaggggcgttcgaacgactccacgtcgatcgtgcccgtcgagagcagcaccacgtcggcggcggccagctcctcgcgggagggtttttcgacgacgcggaccgcatcgccgtagacctcgcggagcgccgcggtcagcgtcacgttgtcgtagcccagcacctcggccgaggacgacgtgctgcctcccgtgcggggaatctgctcggtgaagcgtcccgtcagcaggattttgcggccttcggcgaggggcaggatgccgttgttgcgcagcagtacgatgccctcggcggccacgtcgtagccggtctgcttgtgcgccgggaatttctccagcagggcgggaacgtacttctcccggtcgtaaagtccgaaggcgatgctcgtggcgatgttggggcggatcattttctcaatgtccttttcggtgatgcggccctccttgagcagcgcgcgcacctcgccgaagaactccttgcggcccggcatctcgacgttctggccgctcttgaccaccttctccgtgtcgttcaccgacgaccagtcgctcatcacgcagccccggaatcccagctcgccgcgcaggatgcgccggatcaggtcggcgttctgcccggcccactcgccgttgaggcggttgtaggaggtcatcacgtaacccacgccagcgtcgatgccggccttgaacggcggcaggtagagttcgtgcagcgcccgttcgtcgacgatcgagttcgagcggcggcggtaaaattccgtatcgttgcagatgaagtgtttcagacacgccacggttcccgtcgactgcatgcccttcacatactcggcgaccatcgccgaggcgagcagcggatcttcgcccatgtattcgaagttgcgtccgttctgtgagttgcggtagatgttcatgcccggacccagcaggacctcgatgcctccggcgcggcactcttcgcccacggcttcggcataacgataggccagcgacgggttgaaggtcgctgcgagggagatcgggcacggaaaggccgtcgaacgctccagctggcggaccatcgtcgggtcggacaggttgtcgcgcatgtgcacgccctgcgtggcgtcggagagatagatgtagggcatgcctttctcgggcacgccgtagaagaagaacgaggagtagccgcgcatgaacgagatcttctcgtcgagggtcagctgtgcgatccgggcgtcggcctgccggtaggcctcgtcccacgctacgacctgctgggcagcggccggtgcgatcgccgcggctgccgttgcgaaggcgagcaaaagttttacggaggttttcatcgttttttgaattggtttgcgtttctgtcttctgcaaagttagcgcatgaacggcccgccggaacggctcttcggaaaaatataaatgatatgaactgtcaattttctgaaaaccagttgattgatgcttcagatggcgttgaattatacaaataaaacaggtccgataatttgcttttgcatgctttttatcgttatatttgtgcaaatccgttgcctgaaatgaaaaaactgcctctccttttcgcggcctttctcgtcgtctccgcatccggcctgcgtgccggggaaccttcggacatacatacgctgcttcgccgcctggacggtctgctcgaccgccgggaggagttcctgctccgccacgaagcgcgcctcgactcgctcaaatctctgctgcgcggcgacaccctcgggttcggggcgcgttatgccgtcacggcggagatcgcggagcgttatttcgcctaccagagcgactcgacgatcgcctacctgcgccggaatgtcgcgctggccgaaagggcggggaatgccgacctgacgatccgtgccaaatcggtcatggcgatgtgttacagcatgaacggccgcttcctcgaagccgaccgggtgctggccggggcgaccgacacgctgcatatgagccgtgcgacgcaggcggcctattatgccgcgcagcaccgtcagaaccgcgagtgccgcagccagagcgagccgggggcggagcgcgaccggtttcgggcctgcgaggagtactacgcccgccgtgcgctggaaaccaccggcgacatctcgaaacgtttctatttcgcctacctcgtcgccgtggacgaaggggattacgaccgtgccgccgcggcttgcgacagtgcgttggcatgcgctccgcccgcgtcgcacgactatgctcgggcggcgttctaccgttcggagaccgaaaggttccggggcgacgaagcggctcgtttcgaatggctcgtgcacgccgccatggccgatgtgcagggggcggtccgcgactacggcgccttgggcggcgtggccgaagagctgctgcgccggggcgacgccgcacgggcgatgcggtgtatccgcgttgcgatcaacgacacgcaggcctacaattcgcccatccgttcgtggcgcgacatggcgattctgccccagatcgagcaggcgtacagcgagcgcaatgcccgtctgcgcgcgatgtacgtcgcgctgatccttctggcctttcttttcgccctctcggcaatcggaggcgtgctgttcgtcctgcgccagaaccggcggctcaacgccgtgcagcagaccctgcgcgagtcgaacggaaaactggccgagctggctgcgagcctgcgcgaaaccaatgccgacctgagccggcagaacatccgcatcgccgacgccaaccgcatcaaggaggtttatatcggcgggttcctgaagacgatctccgaatatatctacaaactggccgacacctaccgtcatgtcggccggatgctgcgcgacggccgttccgacgagctgcgccgcgagtacgccggaaccgatgtccggagcgacgaactgaaagagttctaccacaatttcgacaccaccttcctggggcttttcccctcgttcatcggggagttcaaccgcctgctcgccgacgatgcgcgtatcggggtccgccgtccgggaagcctcacgaccgaactgcgcatcttcgcgctggtccggctgggcatcaccgacacggcgaccatcgccgcactgctgcactgttcggtcaatacggtgtacagctaccgttcgcgcatgcggctgcgttcgctcgttccggagcgggatttcgaacagcgggtgcagtccatcggtctcggggacgatgccgcggagctttccgggacctgatcggaacggggcctcttgtcggcgaaacacggagttttttcgctcggggtgtacgctccgacgcggaaatgcgtatatttgcagctcgcatataccgatacgatgaaagattttgcagccatagatttcgaaacggccaacggcaagcgcacgagcgtctgctcggtgggcgtcgtcgtcgtgcgcggcggcgaggtggtcgatacgttttaccgcctgatccgtccccgtcccaatttttacagccatttcacgacggccatccacggtctgcgctatgaagatacggctgatgcccccgatttcgcgtcggtgtggcgcgaaatcgaaccccgtatcgaggggctgccgctcgtggcccacaactcgcccttcgacgaaggctgcctgcgggccgtcttcgaactgtacggcatgccctggcccggttataccttctactgcacctgtcgggcctcgcgccgcaccttcggcagccgcctgcccaaccatcagctgcacaccgtctccgccgcctgcggcttcgaactcgaaaaccaccaccacgcgctggccgatgccgaggcgtgcgcgcagatcgccctgaaaatcctgtaatatatattaggtgtcgcccgagaagtctgatttttacgatttcacccctgccggagagcttccggcaggggtgacttttttcgggggacttttcggacggccttttctctccgtcaaagtcccagctccagctggaagcggatctcccagcggttgtaatcggggtctatggacctgctccgggtgttgtacgacatgtcggcctgcactttgaggctgtggccgatgatgtagcgcgtgatgcccagcgtggtctggttccagttgcggtatccggccagcggctgcacttcgctgtccgggaacagcgtcgagttgcgcagggcgatttcccattttttgttgaacaggtagctggtctgcacgttgagaccctgcccgttgtagacgaaggctccggtttcggggctgaacagcgggtcgctgcacgaacgacccatgaaatcggtgtagaaggcgaagccccggtattcgaggatgaaatcgacgaaataggaccccaggttgcgtgtggcgtcgccgggcatcacggctccccgctgacccttcagccgcgaggccttgtggttgtaggagtaggctccggcgagcagaatcttcacccgctcctcgaattcgtagttgccctcgatgacgtcgcccttcgacttgaagcgtcccagcggatagagttccagacgccccgtataggccagccctccggtcggcgaactgccccagttgcggccttcgcccagtgtgacggagccttttgccgagagattgaagccctcgccgtggcgcatgttgtattcgccgaagaacccgaagtcgcggtcgaggttgaattcgctgttgacgatgctccggtcgacgaattgcagggcgctcgacgagttgatccgcgcgcggttggccttgatcttggtctgcccgaatccgatgttccaggtggcgttgggcacgtagtagacgatggcgtcgcgcacgatgttcatgtcgccgccgggcagcggctctgtgtcgtaggaggtgaatcccagctggaccgagtagaccagtttgggcgaatagatgtaaccgtcgaagcgcagccgcagccgtttgacgcgggcttcggtcttggtgagcgtgaagtcgtcgtcgaacgacagcgccagaaggttctgcatgcggaagcgcatcgtcagttcgaaccagtcgtttttgggccggaaggtgatgcccttgccgatctcgatgttgggcatgttgcgcagctgtgccagcagttcgccggtcgaatcggccgcgatgatttcggtgcggaggttgcgtttctgcgccgcagggacctgcggcctctcctgtgccgcggccagcgaccagcaggcggtcagcaggagcaggatcgggaattttttcatcgtatctttctgttaattctctttcggttgcatgtcggacaaaagtacaaaaaatatgcagagtccggggaaccgcgatgcaaagttggggcgtaaatctgaaacgaatttgaaatacaggggcggcagagggctttcggcgggtaaaaagatgcggcggaagagataaaatccggaaaaataggatttctggaataaaatgtgtatctttgttgccaaacaatcgagttttgttttgaatctttctttgtaagtgtttgatcccgcagtccatcgcggtttcccccattctcaaaatcgacctcattagcttgctcttttgttgggagcggtgcgccttgtgcgcttcggtatttgcaaaaaaataattgataaatggccaaacgaattacatcgggaaagagagaaagagagaaattaaagcagaccaaacgtcaggacaagcagaagaaaaaggaggagcgtctgagcggcgggagccgcagtttcaaggacatgctggcgtatgtcgacgaaaacggcgtccttcacacgaccccgcaggatgtgaagcccaaggaggagatcgacgcctcgcagatcgaaatttcggtcccgagacagtcggaaatcgaggaggaggagccgatgagcggccgggtggaatatttcaccgcatccaaaggctacggcttcatcaaggatgccgccggttccgagaaatacttttttcacatcaccaacgccccggcgggcattgccgaaggggaccgggtgacgttcgaactcgaacgcggcacgcggggaatgaatgcagtacgaatagttatcagtaacaaataacacttttttaattaacttatcaagagaatgaacatttatgtttcgcatctgagctggggcacgagcagtgagggcttaggaaatttattcatgcagttcggcgaagtagcgtcggctaacgttattaccgaccgggagacgggccgttcgcgcggtttcggcttcgtcgagatgcccaatgaggaagagggtcagaaggccatcgaccagctcaacggaaccagcttcgagggtcagacgatcacggtcaacgtggctcgtccccgcgaggagcgctcttcgggcggctacggcggcaatcgcggaggcggttacggcggcaaccgtggcggaggctacggcggcaacggcggcggttacggtcgcaaccggtactaattccggattttatttcagaacgaatctccgggagagcgtttctccccataccatacggagcggggcggtttttaccgccccgttttttgtttttccctattttccacacgcccagcgacatcgggaaaaagagcgaaaaattacccgcgggacctctgtttttcccgaaaaaagcgataacttgccgccatgaaggagacggtgctcgaaaaactcaaggtgctggccgagtcggccaaatacgacgtttcgtgcgcttcgagcggcgtgacgcgcaagcatcgtgcgggcggggtgggcagcgccgcggggtggggcatctgccactccttcacggccgacggacgctgcgtctcgctgctgaagatcatgctcaccaacgtctgcatctacgactgcgcctactgcatcaaccgccgcagcaacgacattccgcgcgccgccttcacgccgggcgaactggccgaactgaccatcgagttctatcgccgcaactacatcgaggggcttttcctctcgtcgggcgtcgtccgcgatcccgactatacgatggagcgcatggtccgcgtggcccgcgatctgcgcacggtgcaccgtttcaatgggtacatccatctgaagagcattcccggtgccagccgcgaactggtggccgaggccggacgctacgccgaccgcatgagcgtcaacatcgaaatcccgaccgaacgcaacctgcaattgctggcccccgacaagaattacgaaagcatctaccgcccgatgagctacatccagcagggggtgctccagagcgccgaggagcgtacgcgcttccgccatgcgccccgcttcgctcctgccgggcagagcacgcagatgatcgtcggggccacggacgagagcgaccgcgacatcctgctgctctcgtcggccctctacggacggcccacgatgaagcgggtctactactcgggcttcattcccgtcaatccctacgacaagcggcttccggcgctcgacaaggcgccgctcgtgcgcgagaaccggctctaccaggccgactggctgatgcgtttctacgggttccgcgccgaggagatcgccgacgagcagacgccccggctggatctcgacatcgaccccaagctggcctgggctttgcggaatcccgcgttttttcccgtcgatgtcaaccgtgcggactacgaggccctgctgcgcgtgccgggcatcggggtcaagtcggcccgcctgatcgtctcctcgcgccgctaccggacgctgacgcagcagtcgctgcggcagatcggcgtggtgatgaagaaggcgcagtatttcatcagctgccgggaacttactgcggggcagggcgtcaacgaactgcgccccgagcaggtgcgctgcctgctgaccgctccgcagcggcggaaagcgggtaataacgaaggccaactgacccttttctgacgcgatgctggttttccgatacgacaaatccttcgacgggctgctgtcggccctgttcgatgcctactcgatgcgggcgtttcccgaggcgctgatcggccccggggagcccgaaccgctttttacggagcgcgtccacgacgttgcgaccgacgaggcgcatgccggccgtgtgtggcggggactggaacggcggctgaccgcccgcacccgttcgatgttcgtctatgcctggcacggggagcagccgcagggcgacctgctgatgctgcgctgtctgcgccgtgttttcgacgagggcggaggcgtcgtggccgaccaggccgatcccgacatgaagtcccttttccagttggcgctcaaggtctcccacgagcgggaacgtctcaaacagttcgtccgcctccagaaagccgccgacgggacctatttcgccgccgtcacgcccgagcacgacgccctgccgttggcggtggactatttcaccgaccgtttcgccgaccagcggtggctgatctacgacaggcggcgcgattgcggctactattacgacgggcatacggcgcggtgcgtcacgctggaggacgaccggggaatgatcgccgacaaacttgccgacgaatggctcgccgaggacgagcggcagtttcagctgctgtggaaaaactatttccgggcgctggcgatcccccagcgcatcaacgagcgccagcagcgccgtatgatgccccgccgttactggaagcatctgactgaaatggagtgaccggccgggacggggaggccggttttcggtcagacatgcaggttgaacagcttggcgatgcccgtcacgacgatctggacgccgacgcagaaggtgaagaaggcgaccattttgttgatgacgatgctgccgctgttgccgattttgcggatgatccgttcgccctgcgacaggaacagataaagtatcaggcacatcagtacgatgaccagcgcgatgatcgcgtaggagagcaggccccgcgcccagccgttcttcatgctgaccgacgccatcagcgtcaggatgaccgagacgctgcccgggccgatgctgatgggaaaggtgatcgggtagaagatctgcgactcgatggccgatttgtgaatggggttgacgtccttgccctgcgtccgtcccaccgaggagtccgaatcgccgagccattgcagggcggtgcggcagatcagcagtcctccgcccagttggatgaccgggagcgaaagcccgaaaagcgacagcacgaaatgccccacggccaggctgcccagcccgacgagcagatagtcggtgacgattctgcggatgatcgacctgcggtcctcgtcgttcagccccgacagcagtccgttgaccaggaatccggctcccaccgggttggccaccgggaacagcgccatgaaggcggatatgaacgtgaacagaaacccttcctttaacatcttgaggctcggaactttgtattgcaggcttgagtctggcaagaaccgttccaaacctttccggtttgcgggtggagccatatcgcccggaggcggaagccgttcggttcccggaccacgcgtaatcccggtctccaacgacgacaacaatcgcagaccggaaaagtaaaaccctgcaagtcgttgatcttgcagggttttctgttttatagccgctttgcgtgtcggcttttgcggagaggacgagattcgaactcgtggtacaggttgccccgtacgtcggtttagcaaaccagtgtacggaaaaaatttctgcaaaaatatttttacactatacagcgtccagtaaatcgttgtaagtaacgctacaaaagtatgttataatttttgcaaatgcaaatttattgaatgtatattcaaccttaaaaatgaaaattatagagaggaaaatgatttttataaaactattataaaacttttggaaaataaaaaaccgccgaaaaaatcggcggtttcaattttgcggagaggacgggattcgaacccgtgaagcagtttacccgcttgccggtttagcaaaccggtcgtttcagccactcacgcacctctccgggcagctaaaactaaatattgctattgttaagcgggacaaaagtaaatgaaaaaaggtgaataaccaaataaacgtgcagaaaaaaattatctacaaaaaaaggtggggataatccccacctgtaaaaagggcgcagacgacgctgatctttcgtaagttcccgaaggctcctaatctatgcttacgcgagtcggcatcccgacacaatttattttatgctcacctgctgccctaatttatagtattcgtgcttttttatccatgtctttcagaaaatagcagattgtattttctgctttggcgctgacggccattgcccgtttttgagcaatagggccaaaaatgtaatgccgcaaattgggtggatgttctatgtattttgcgaaacagaacccaagatttacagaggcgtaaaattcacttggtttagtccgcgcctttgaaagtacggtacgattccgctggccgctaatctttatatacccccgattaactaatgtagttctttgcatcgtgtgaattgggagtattaagtattgatgcggggttatggtatcgcgcacctgatagatatagataaatcttctgactattgtttccagatcgtgcggaaatcttatccattctccactatatttacttatcaggtctgctactcgcaccgggacaacatcatcgtaagtccaccgtggagcttcattaaacgtcgggtttgtaaatgtcgatattctgggataacgttcggcaagggtgttgttgatcgacggggcccctacaaaatgccattgagtgcccattatagagcggttcggtattttgtctcgcttctgccggtgccgtgacgtgcatcgagcaagtcctatgaatagtttaggcataatccggttgaaatattccgtgctacacatgggccgaaaatagatgtccgcattaagcagccctccggtttcattggtgaaatgcgtacttttgtcttgttgtttatagatcacgcggataaccaaccccggtaatttaccgtcgtcctcaacactcccgccgccgctggctgcggggacgtaaagtttatgggatgccgggtctttttttacctcaacggtgtagccggttgttatctgcgctgcggccactccaccaataacggtttctgtggctgcgggtagttcatacggagccggggtgttatccaaatcgttgtagtcgccgcttgtggcgacggcggccagctccggcatagtcggatatgccgggatatacagtcgatgcgttttggggtctatctgcacctcaacggtgtagttctttcctttgtctgcggcaataataccacctaattgggtagctgaagccgggaataattcctgtgtgctgtattcgaggtcgttccatgccgtaacgccgtcgccaaatttgatgcgccgcgtatcgagctccagcccgatctcgccctcttgtaatatcggattgaccgcggcccagcgtgccgcagttccgcgccgctgctgaaaccgcgtatgaatagtgataatttgattcattgtttctatgcgttaccgccgtccatgatgaaagtattgttcgcatcctgtaaatagctggtgaggcgtgcaggcgtaaagtacagacggctgccctctgctatgtcgtcagtcgtaagagttataacgccgacttttccgtttacggataatacggcgttggccgggacgggtatgcgcttccagttcgccagttctttgggatcgttacctgcgaggataaacgcccctgccggcgcatcgcttcgcaagcagatgtcacctttctgtacggttttggctaacatttccgcgtcgctggcggcttctacgacatctacaatcgcaagctgcggcaatacagacgtgtttagtttgccggaagcatccaatatcggtacctgtccggcggtggtgccgacattgcgcgatgccgccgtacctgcatcccggattttatagaggggcagcgatggtacgtcgttttcggtaattgataaagtcgttgcgattgaaatattaccgcttccgtcgaatgaggcactaccacctacgccgcctgtaagggcgattgtccgggctgttttcagtttgtcggccatcaatgccttatcgacatatccggtgtcgggccccgctcctgctgatttcgcatatttatcttgctgcatcaccccgagggcgtcgaaactttcgacggtaacaatttgctgtaataccctttccaaatcgtcactccatgtcaccatatacagcgtaggtggcgttgtcataatgtgcatgaagattgttcccggttcccattttttcgcgtcttcatcagttgggggatcatcaaaaagaatgactttcccaagagtatttttaggcagcattgtgaatacctttgtgccatcgcctatttttagatactgcttgtccgtgcaatatcccatttctccttttatcagtaccggattggcctttatccaattcgattcggtatcgttgcgaagaacgagctttgcttttaatgttacgtttgccataatgataggtttttatgcgtttcctccgtcgataatgtctatttcgtcatagtgttttccaatgacgcagtaagttaagtgttcatcatcccaccgatatagtttgctggcttgcatatccagatacaacatgttcggatttccgatgtttggaaagttgtggtatgtttgaaagctgcgcagtccctcggctgggatgttggtattttgtgttcctatccaccaattcccgtctgggccgacatgaggggttatgccatcttttccgtcgattccaatacgggttacaaaatcgaaatacagccgatgcgaaagcgccgagccgtccgcaaccgttagattgccctgctggattgtgcaaatcaatttcatggtcgtatttcgcgtgcttttattagggggattgtccgacgctcggccttgagtactgcatcggtcagcgtgtcgcggagttcaatcgtcagtacgatttcaccctcgtccatatcgaccgtggctgaagctgggacatttataaagtagtgggcgctgtcgcgtcgctcgatcttcaaatccgccgatgtgtccgaacgtgctacgatgcacacgccgcgtcgtgatgtcgaaagctgggccgtaattcggtatcggtcgagattgtcaaaccatgctgacgggatgatctcgggcaacacgtctggtatgtctatctcgtcctttatggccgtgaatagcatcccgaaacttgtgcctgcaattatcgcttttgtgcgccagcaattcattgttatagtcttttgcggatgattatgccgatgatcgccccggtcagcagtccccagccgatttttcccgaggtgagccagaaccgctgccaccatgtcagcggcataggtacagggatttcgatgcgttcgcgctcttgccggtcgattgtctgggttgtcgtcgtgtctgtaacctcaacagggatgtttatcggcttctcctgcggcttgttccgtaggtcgtggtataacttaccatcgggacggataaaagcgtcagaaacggcgtaatccgtttcgaggtgcgacgtgtcggacggctcgatgatcgcgcttgcccgctggtcggggatatgcacgatgatcggcacgtattcgatgcgtgtgcggatgtctactttccgatctatacccacactatcggtgcggctgctctggatgagtgtccggggtgccgagcaacttgcaagtccgacgatggcaaacgagagtatgaatgtcgcggtgcgcatggggtcagatttttccgtaatattttacaaagccaaaccatcggcgcttatgttggtattcgggctcgttctcgtgggcgtaggcttccatttcgaatgccgaagcgtggtaggcttcgtcgttccatcggtcgcgggcatcgcctcgtatcatgtgatatgcgtaggatattgcccactctccgccgtaaagcaggtagtaggtgaaaggcaccagcaggagccatcctgccgaaaggtgcccgcagaacaggtgcgcggctccatgcccgaggcaccagaggacggctcctaatacgcagcactcccaaaactggcggatgtggatgccctcgtgtcgcttggtgcgggccgagagttgtgcgagtttggtgatgacagtcccgaaaaacatgcaggttttgaaattgccgaaaaggaggcgctttgccagcttggagttgtaatagactttcatagttgtaggttatttgttgttgtgatattcgatacagcggacgatggccgcaacgtgcatgtcggccacacgctgacggcccgaccccgaaaagatcagtttgcaatcatccttcgtgtccatgaagaaattttcggttaagaccgtcggacaggacgtgtgcttgagaatgtagaaattttcctctttgtccgggtcgccgtcggtcatgtctttgcgcatccgcttctcgggaaatgcgcgggcggcttcctcgtaaaagatcgtcgcatagttgtcggcttcggtctgtccgatggatgtccacgcttcccagccggtaccgccgcccgcgttcgcatgtattgataccaacagacagttgcttgggccgacaactcgcgcgatcttgttcactcgccgcacccgctcggccaatgatatgtcgcagatctccgacacgattaattcgcagtccacgcctcgggccgtcagtactgcatatacccgccgggcaatatcccggttaaattcgtattcgtaaagctgtgagccgtcgggccataccggagaacgcttgccgggcgtttctttcccgtggccgttgtcaatcaatattttcattttgcgtaaggtttagtaacgtgttgagttgatcgcgccgcgctttgcctttgtcggcgctgtctttgacctcgttgtatttcaacaataagccggttatttctttcgggtcgtgggcattggcgagtagttcgacaagggttgtcattttcaccgctgccgaccgtattgccgtgagattctcccgcacggatttgtattccgtgtaaaccacaccgaccccggccagcccggaagcatacgggagcgaatagatgccgaacagtatggccagcaggtcaaatagcattaacattccggtaacttttccgtagtcgccgaatttctcgaacgaccgccggaacccgtggctgtccctcgggattttgagaacacgcgccttgcggatgccggtggaaaagtcgatgataactgctgctatcattacgaaccatacgacgacctccagcaagatcgcccggtggaaagcgtgtccctctatgccggtcagttcggcgaggtactgtaatatttcggattgttccatattgttagattgttcctgcgtcgatgtttatttcataatctttaggtggggcctcgctcgggtcgggagctaccatgaacgactgttttagggccggacggtagaatcggaataaaagcgttgataattcagcagcagcgatggcgagtttttgtaaataagttttccataaatcgctggcctgtacggataaataccactcggaaacaatcaaataacataatacattggttgcactatggtctactgcgtcgagctcggatagtccgtatagctcccgtccgtcgtccgccagacgtgccgtgaacgtaaggccgcaggtgtcgccctcaaccgccatcggctgactatccggaacgatacgccgaaagtgatgcgataaggtggtgagggcttcggcaatgtgttgatcgaaaaaggcccgttcgtcagcagttatggcgtacctgtcgaatagaggcaaccccttatcgtcggccagcgtccgggcattgtaggccgtttccgtgcatattgtttggaacaggtcagctttggcccatgacaaccgaataatcttgttctcccgtgtaatcatagcatccggtatggtcgttcggtgtgggaaccgataagtttgcttcgcaaatcatcgagcgcatttccaaaaaggatttggtaatactggaataagggggcatccttaccaccataccaccacatgagcatcccgaatttcagcgcgtcttttatgcggatggctgttgcttccggggccatgtcgagaatatcgcgcatacggaataacagcaggtcgggaatgaataacagccgttctacgtttttactgatacgagcccggagagcttcggcgacactctgtaaattgaacatgaacgcatcgagcagggagagttcgagtgtatgtgtcgcagtcatactctgcccggcttccgtcgtgcggttgcggtagtccagtaatgtctgatcgacacactcgttaaaaagtgcccggcaatctattttcacgtcgaaattcatagcagcgataatatttccgatgcgcgtttatctgcggcctgtgctccggctggttcgttggaaacacccagtaccagcgcggcgagcgtccatgcggttacgtcgatcagtttttcgggatagatgtcgttgatccccttgtaagggatgtactcgccctcggctatgtggtgatcggtgcccgtaatactggaatagcgcagcttggtgccgccatgcgtaagtaagacgacaggctttgccataccgcctcgtgtaacggggtgatactgataggtcgctgccgggtgatcttccggcagagcaactaatacgggccgttgccagccgtccatacgcaaccgggcgaggcgtaagaaatcagcgggcagatcaatttcgccgctcccgtcgggattgggcctcaacggacattccgcaagactttctaccgatgaaatcgtatgcaacggggccgcgagcaaaacacgcctgcccgcctcgtcaatgaaatcagcaagcgggaaattcgggctgttagctgcgttatcttcgggataaatctcgtcgatacaccgaagcgcctgtgctatgatctgctcgcgcttcatcaccagttaataaaaagaatgttgcgtttggccgcttcgatcttgatgtcgtctttcttcatacctgcgggcaccacatagtcgaggttggcctgtaaccatgcccgcgctgccgctactgacgttaccgtttcctcgcgagtggccgtggccgggtcggacagcagcgtttccagatcggtcgccgggttgccgggtgttgtttcctcgataggggcggttgtgatggtggccttttcccagaatgtcacctgataggcaggatgctcatgcagcgcgtcgatgatggccgggtcggatgtggtgtaggtgctttctccgaccccgccgaaatatacctcgggctcgaagcgtaccgcttccaatcgcccgtcagcgcaacggacggacgtgcggtatttcttgtggttgagaacgaaaaatgttgccatgtgtcgtgggttttatgacgggagcagttgcccgctcccgtcgttgtgagtagcttatttcaccgtaagcagtgcgtgtgcgtcgggattcgtcacggcgagagtgtggctctcgtcgatacgaacatcacttgagcgggacagacccgttttgtcgcggtcgagctccgtggcttccagcggtttctgtatggcccgatagacgtttgccgggtcaatcacgatggcggccttcgaatagccgtattcgttcagcaggtcgtgcggtttcatcaacaactcgccgtccggagtgctgatacggtggaacgtgataccgaatacgacctcggtactgcccgcctctaactgtttctgaacagtcgaggccccggccatctgcctcccgaaatcttttccgtagaacataatgcgccgctcgctgccgttattgccgcagaatacgtcgctacaccagccatacagcaggtcgttactgatcttgctctcggctcccatgtcgagatgcttttcgatcttacgcacgaggccgtcgctcatgtactttactttccgggtcacggggtctacgaaccgctctttcacaccgaaaagcgcatcggcctcgttggtcatgcggaaatccagcagagcttgttcgcgcatatcgaggatgccgaaattcacctccttttccgaaaggcgttggtagaggccctcgcttacggtcgtcatgtgaatttggcagtagttactgtccgaatagggcatttggctggggtcttccgacatacccgcgttctcgtgctttgccaccccgagccggtaaatcggagtgtcagcgggcagcgcggggagtactgctgcgttgatcgggtagatcgtgattttgtcctgtgcaatagaatcggtagcgacgatgtggcagatcagcggattgagcgagaacccacccgaggctaccggcgtggcgacctttgtggtgtcgtccacgttcatcgtggggaacaagacattgccgtcctgcgaaaagatgtgcgcgttgattacgttgatttgctttgccccgctctcgcttccagcggtcacggtgtaggctgtttttactttgctttgcacgcctcggccccggacgctgtaatactgatattcgaacgaactgcacgggacgttttcgagttcccgcaacagcgtgtccatcgggaacagcgagggattgatctttgtgatcttctttgaaattgtcgggcggttgatgtcttgatcgtccaccgttccgtcagctttcgccggcttagtcgtggtgacggtgccgcgcatggtttcaccggcggtcgctgctgcgccgctcacggccatcagcgtcgtgccgaggtcgtcgggagagaagaacgcgagcaattcacgaaacaggtaaacggaaacgacgcatccgcagatcgccagaacgccgtacaggaatttgttaattttcataatagtttgaattttggttagaacttacgtttgttacggcgctcgattacctcgtcgaacatatctttgggggtttccgcttgttcgggtgtttcgacgcttccgccgtcggcaggcaggccgtccgtcttgcgggcctgcttgcgcttggcctcgatctgctcgttgcgcccctccaccttgcctgtttcgagcgcgtcggctacggctgcgtcatatatccaaccttgatagagtttggtaaggattcccttattcaccttgccgtcgagcaggtttgcaagaatctcgttatctacccattcgacgaactgtttttgttcggcctcgtcgagcccatgttcggcgaagaacgcatctacgtcggttttgctttgggcgatgttcttgtcgcgggcttcggtgcgggctttcatgtccgcgaggcgctggctgcgctcggttgctgcctttttgtatgcgtcataatcgggctcaccttctggaacggccaattccgacggatcgaactgtcgggcaatagcaacctgcaccggcacaccgttcgccacgtcctcgatgatctgcgcgaactcggggtatgcctgtactacctccatgatcgttttgttggccgcctcgtgtccggcgattttcttgtcgctctctgcgaggtagtcgtaaagggtgttttcgtagtcgtcctcgtcggcgaactgccggtcggggaattttgcagtcatatactcccgaacacgcgatacgcggggagcttccgcctgctgctgatttgtgttttcctctcgcattttttcacattgattttgtgtgtgatagatttcgatgtaaaagtatcttatttgttaattttcaagatgttataattattattaaacttgcgatagttgcacaaaatgtatcactatgagcaggaaaacgagggtacgggacgaggtgcccgagaagattttgaagaggcacaatgagatacgccgccgctatgaagaaatgcttgcgcgggaacgcgccgagaatcccgaacggctgaaatacttatcaaagacatattttgtcgaaatgctctgcaaagaccctgtaatcggattgagcccgaactatgtacggcgtatcatcaatgggcgaatttgatataccgtcgctgcttacccagaacgaggagcataagtcccgtttgtttgcgccctacaatccgcttacaggtgagggatcgcccatcgaacgtgtccggctttatttctcgtcggaatcctatgtactgataccgacatacatggcccagaccccgacggttgctgcaatcatcgacgctgggggtgtcgaacaatacgccgcacgcgagggcattgctgctgaggtcatgtgtggcgtcgtgcatcggctccgggctgtgtatgattttgagttttggtgtatctcctgcgttaaaatcttcgacaagaccacgggccgcctcgtcccgttcaaactccgccgggcccaactcaagctggcgcatattctccttactgatttattcgcggggaagcctgtccgggtcgtgctggttaaggcgcgacaatggggaggttccaccgttacgcagatgcttatggcgtgggtgcagatattccaccgttcgggctggaatagcgtaatcgtgtctgatgtggaagaacaatcccgaacgattcgctctatgtactcgcgcatggccctgcggcatccggtagaaatatgcccggtacggttttgcaattttgagggttcgagcaagaataaaatgctggtagatcgggattgtgtcgtttcgataggctccatgcagaaacccgatagtttgcgagcaggggatataaaaatggcccatctttcagaggtgggcctatggaagcggacaaaagagaagagccccgaggatgtgatacagactatcctcgggtcggtgccacgggaaccgtttaccgtcgtggttttggaatcgacggcaaagggcatcggtaatttctttcacgatacatggtgcgatgcggtagacgggaaatcggcctatactccgctattcgtaccgtggtttgaaattgacatttactataaaccgttcatcaacgaaaagcagaagatcgagtttatacagtccatgacgcgcgacgaactaacccgattctatgcgggggccacgttggagggcctcaactggtaccgggagaagcgacgcgagtattcgaccgattggcagatgtgcagcgagtttccctcaaccgccgatgaagcgttccaaactaccggacgcccggcgcatgacccgctgtatgtccgccagcagcggccctttgtccgggaaccgctgtatgtcggggaactgctcgccgatgcgacctacgggcccgaagctctgcaaaatttacattttgtgccaacggccaccggagattttcacctttggaagctgcctgatacctcgcggcgtatcgccaaccgctatgcggtggcgctcgacattggcgggcgcagtcccaatgccgactggagtgttatttcggtactcgaccgtatcgccatgatggacgggggtgtggaagaatgtatcgctacctaccgattccacctcgaccaagacctaaccgtatggcgggccgtgcaggtcgcggaatggtactgtcatgcgctgctggccgtcgaagcgaatagcctcaaccccaaagggcaagagggcgaccatacgctgacaatcctcgacacgatcaaagagcattacgacaacctgttctcgcggtcagaccctacgcgcatccgagagggccagccggtgaaatatggttttcacaccaacgcggccagcaagaccgatcttgtaacccaaatgacgaaacggctacgcgaaattctctacattgagcgggataaacgggcgttggatgaaattggctggtacgagctcaagcccgacggcagctatggggctgttgatggaaagcatgacgatatttatatgagccggggcattgtactcaaagtttcacaacttatggatttacccgtggagattcggcagagtatcaagccaccgcccggtaacgtcatattgtcggaagcatccatgtaaaaaccccgacagactgactgccggggtttccgttgtggggctatggttttttctattcttgtttcagccggtcaatctcagcttgtaatttatttatatattcggaatattttttgaatgcaaataaccgaatatttctgattattatggccttgctgcggagttgtagccacatgtcgaggatggcgagaaattgacggtagagtaaacctgcatcggctgctgtccgcacttttttattttgtttgaacgcatgggcaaagacgtaagcccccgcatatttctcgtctgcatattcgctgggccgttctataaaatccatcgtgtcgaatagagttgcggcatcacttggcgcgttatgccacaattccaaatgttcaagtggaaagttatccgtgttcatggcaaagaccgggtaagtttccgcccaccatatattacggcctataacctgtaaactactgctatcccaccgggtgaagcgatacattttcaggctgttttcaggtgtgcccgtttgatcggtaagtacatataaccaaaaattatttttgccgtcaaacattatttggccgttgaaataacgtttttggttaaagaaaaaatagataatatgcggggttactggtttcgcggcttggtaagtgcccctttggccgaatttatactcaacaatatcacgggagttgagtttaaaatcccaaacccagaatcctgccttttgggtatagtctttctctaacacccaattctcattttcggtttcgcggctatactctttttcaacgcgccagtaaccggacggcaagttgtcacacgaaatctcatcactttgtttttgtatgatatgtagtttcccgtcaagtaaacgatcaagttgcagcttgtatactgattccccatttccccaaataatttccaagtgtttgtcggttagtttggcgacatagtagcgcctttctccgatctgtaaatatcttgtcttgcggtcgaatgaataggtttggatgctgttattgtattgtgtggctatttcaacggtgttgtcctttgaaaatagatattcttcatggccgcccagccaaatgttggcatcttcccagaatccgtttctgtaagaactgagaatatgatgtgtccatgctccggcgagtgtgcctgtcataggtggccgctttagccccataagccggtaggggtctgtggtcggcaaagtattgaggatttgcatggcaagaggccatgttattgttgcttgctgatctcttatctgaaatagtttttgtcgttcttctaagccgattctcgccccgaaagcaagtacttgctgtctcgctttagtatattttgtttcacttttttggatgatttcaaagaggtattcccattgttcgtttgtagtcttggtcatagttgtatcacttatatggtagtaaccagttgcgtaatgttcggggtatttgcccgtctatgttgtgtgtatatgcggcaccgttggatatgctgaccgatcatccaaccgaggcaaaacacacctgcggctaacgacggcatataggagagtgaagaaaggcgagagccccaatataagtgtatggaaagaatccttacatcgtcaagccaatgacaatttttttgggtgctcccgctttctggcatctaaaaaacgggggataggttgacaatgatctgtttgataacgtaatgccgctatggtggatgatctcctatcccccggtatgtttgggccgggagtttgcgagtggcactcccaatgttcccggcccggtcttgctgttatacttggtttggtcgttaaggaaagttccggttcatggttagcagtaccagatataaagcaaaacgtttttttcaaaaaggaacgggcaggcgcttgtgtatgaagatttttgaactttagtgacgcctcatttgttctcaaaactcgacgcctgcccgtgggtcgcgcaaaaggagtgcgcgacgcattatctattaatccacatttaagtggctggttaaaaaagcaaccccggacattgcttcgcctcgtagatgccctgttacgccttagtacagggccgttttgccgtgggttgcttgtgggtgttgtgatagtataagggcagtcccggtctgttgcggttgtgggcccggaactgccccgcctctgtcctataaggggtgagctttcacggaagatgtcgtaatccttgcttttgcgtactctcggttttgcggcgtgtggggctgccccgccgtgcccctcaaacacggcgagttttgtgcgcaaaaaataatcggtcgatttccgggcagcccttatgtgtgttgcttgcaggtgtgcgatggtgtagattgaaatattaagaactgggcagggtgcaatgggctctgctgccccacaatttttcagcctgcttatcgaagcaaacatataatattttttgttcgtttgtaagaaaggaatagccgattgcctattatgcgccctaacgcataggccgactactccgtgcggcaaaattgggtagttagaatttaccttgccgcatgaaaaaacaggggcccccgcctttgtaaaatgactatgaaatcttgctggaaaagaacaaattgccatgatcgacgggatgcccctgtatgtgtttttgctggtaaaataggaggcaacactccagttattcgtaatgccatcagttgtaataatccccgcaaatgctgtcccctttgaaagccttttgtagatgctataccggaatacctcaaccgcccccggtttacgtcgggtgtggctattaatgttggatgaaaataataaagggtgcggggctgaggtagtgacgcaattcacacagatttggccccgcacccgtggcccaaaggggattgggccggtgacttgtcctttgctaaattttgggagattccttaattgagtatatggagtgaatgaatttgcagaaagggggacgcggcgcgggttcacattaattaccataccagattttagagcctcaccgaccgtccccgtcacgatctgccagatcaaacgcataccgacacccggcgatgtcgaaccgccggaacgtagtgagttttgctggatgttggtagaccgtgacataagtttgggtatgatttgcggcccggaaaaagaaagggacgcttgtagcaatccgactaccgggcctcgcgagcccccaaatcaagatcgtacttgcgccccggagtgctggatagacagacacgaaccgaggtaacaagttgtctttgatttggtgaacaccatccgaggatgggcgcgagttcggtaatcaatacaatttgtttccctaatatgtcacggcaaagccgtatttttgtgcgaatataacataactttttcggttttagttatgcaacccgcataaaaagggcgtgggattgtgccaagtactccacagaaggcccgctaaagcccgttcgaaaatacaagacacaagagcccacgccggtagcgtgtggtgtccacaaagtttgttccccgcgccgccggtcgtagacccggcgatccgtgggagcgtctatgtgtctttgctccgaacaatgaaaatttagcggttttctgtggaacaaagctacaattcgccctttcagcgaatcgttacccaaaagtagtataaaaattctatccgggcaacgatgcgcaggtattttttatctattgtggcgtccttttgttatcattcaatccaaacagcatactggatacccttggtatgtcccgtgatttgcataggcataaatcaccgaatatagagggtactttgcaatattcgcgccgggcctaaaagcccattgcccgtatgtgtagaggggatatggacttatttgcctgcggtatggctgccttgtacggccagcctgcaactatctgcaaaaacagtcatgcggttataatttcccacacaaatataaaaacaaaattacaaaatagatcggtcggaaccgttgaaagacaatactttatacgaatatataatttaggtctatccgcagactttaatagtgataaatagaaagtctaaatttctgtcctttgtaccatgattaagcgacatcgtaacgaaaaactgataagggctgcggggatgcgattgcgggaactgcgggaagcacgcgggctgtcgcaggaaaaagtgctgtttgaaacaaacatacacctttcgaatatagaaaacggacggcaggatattaccatcgctacgctggtggaattgtgcagtacttacgacacctcgttagaggatttttttaagggaatgaaatatgctcgatctggaacgaaataatgaaattctacaaaagatcgccgcaaagttacggttattgcggcgaaaggctggcctattgcagaaaacagtatcggcggaaaccgggctgaatatgggccaccttgagggagcgcggaaaaatgttacccttaccacccttgagcggttgtgcgaatactataatataacgctcgacgaattttttaaagatatagacatttaaaaaggctatccggtcggatagcctttttcgttatttcagcaccttgtttaccgggcctgtttctaaaatctccatttgccgcatggcgatctggtttagcagtaacagccgttcccgttggggccggctctcggaaataaagaccgaattaagattttccatgtttgataggcagatcaattcgttgatcgaggcgtagtcgcggatgttccctttcttgccggggttcgcatcccgccattcccgcgcggtcatgccgaacatggccacattgagaacgtcggcctcgtctgcatagattcggctggcctgtgccggcgtaagctcttttgggattaggttttgttgcaccgcgtcggtgtggatgcggtagtttatcttggtaagctcccgcttggccgaccaacccagccgagcctgctcctgctctttcaaccgctgaaagtcgcgcaccaaatatactttaaattccgggctgatccacatagcaaactcaaaagcgatgtctttgtgagcgtaggttccgccatagcgcccggctcgggctttgaggccgatagcattggttttctctacatattccttaacgctaatccggaatctgttcaacccggcttggtttctaattagggcgaattcgccccaattaaaatcgggattatagactttttcccagatgccgagaaattccagcgtgttccggttccgcagccaatctttgacaacaaaatcaccgtctttggctttgagcatatctgtaatgcagatataatcggtatcgtcgatctgcaaaatagttatttcggtgccctcaaccgaaatcgtctttgtgtgcttttctgacatggtaacgcaatctttatcacaaagataacagaaaaatgaataattgttctggttcggggaattagttttcatatctaattcgtattgaccgaaataaaaaagcccggcgactgccgggccgatggttatgctatcctaaataacgacttatattcctgcgtacaatatacgtggtttgacgttctgcacgggacttatcaaattgttgtttatcatacaccccggacgcattacattccggacagaaaaaactgccgggtgttgaatcttccccgacttgtatggtcaggtgttttgcatcccagcaatgtatacaatagcggatgttggggttttctcctttaagcgtaaaatatccgtcggtcgtacgctcgatcttgtgtcttaaatcttgttgttcacgtaattggcgaatttctcgctctaattcgtcattgcgtttttgaagattaagagcggtattgctaacctcaataaatttctgttttaattccgtgtgtgaaaaaatacggcttacatttacggcatccttgatcatgccccagattgatgatatatccataataaataatataaaaatcatgtagcaaaataggggcgaaatttaccgaaaacctattttatttattttcttttatgcacaaattatcaacaaattacgtgtatattggctctattgcgctgcatccatgtatcgtttcagcatatccatcgctttggggtcggcgttttgctgggctgcctgttgtagcatttgtaaccggtcggggtcgatctgcccggcggcagcctgttcgctgaacgtttttagctcggcttgtatcttctccgctcccggaatagagcagttttttaggaatatttcgaggggaatgcgcccgctctccaatagcttcataagtagatcgtccgtcagttgccggaacaccggcgtatcggttgatttggatgtcgtcaggttgaaatccacgatcttccgggccatttcaggctcgtagtatttcgccagttcgctgaccgatttaccgttaatatctacatagcggcgtgtcgtgtaaaactgcatcagcaccttgagtaacttttcgtcgcgttcttcgcagaacatattgtaattctcaaagagcaccacgaaattctgcgcggagtactgcgcctgttgtgcatagaggcttgacggagtgttagcgtgtggggtttggccctgtatcgctccgtttaggccgctgatctgctgcatgatggtcatttcggtattgaacagttcccacgcacctatattcgtgctgttcgtggcaatctgcttcggcagcttatccccggctccctttttcagtaggataactccgtttacctttacatattcacgggcaaaatccttgatgtccatgtcgtcgggaatacattcctgcggtaccataagcaggccctttgccgacgagccgataatgaaatccaacagggtcagcagacggttgatatatcgttgaatatcgacaatatccgacatgacggctttaaactggccgtcgatgatcggcatggctgcgaggacatagggatgttcctcatgcgtgtagggcgtttccatttctttgatacaatgtccattcggggtaaggtatttcacgcgccagtagtattcgtattgctcctgcgcatagaccagtttcaccgcttcgggagcgagccctaccgccgtgccctgttcgagccgttggttgttgatcgcttcgacctcttgcatagtaaggtcggtgtaaacttcctcggtgccgtctgcgtagtcgtggacgtaaagcacccagcgtccgacccgttcccagacctcaattacccgatatttcccgagatcgttgcagaaaaggaaatttaggttttggagccgttcggcggtttgcatgtagatgctttccagctttgcggggtcgtggcaaacgccgtaaatctcgcgtaatgcctgcacgtcttcgcggtttattgtgaaattgcgtaccagatcgtcgaacgtatagtcgtggatctcgccgatgcgccggatgtcgtttagccgggggtcttcgatgtctttattgaagaataggcggttgatgttcacgaggtcgatttttccgtcggtgcggttcttggtactccaatagtcaaagcgcacttttgcgcaagccaaccccgtcagacataattcctcaacaacattaatgtcgagttttcgtactttgtttagctggtgacacgactgcaacgcattcgtaagcatttcgcccagcggttgatcgtctttgcttcgggcatatacgacagtctgtgtcggcgatgaaagaagctgcccgtggatgtttcggatgtactgctgtaaatagttgtgtttgagcggaattttgccgcttcgggaaataagggcatcttcgcgtatcatcttgccggggttctccgggtcgggcaccttgtcgcaccattggtcgccgttcttgtagcgcaggttccgggcgtgctctttgcgcaggtagagcatagcatcccaatcttgcgcacaacgccacaacagcgaaaggttttcgttcgaataccgcagtccgctgcgctcctgctcgcagcacgtctgcgcgatgcctttgctggcttgggccaatagcttcagttttttggtgtcaatattctgtaacattttcgtcctcgttgagagtttttaccatcgtttcgttcagttcttcccggagccggtcatattccggtgtgttggggcgggtgtcagataggattttccgtagcttgttcacggcggtttggtgggctttaaaaatcgtaatccgttgcaggttccgctgcacctcggggtcttggcggtcgagcgctgggccgagccgtttgtactttgccgcaatgttggttaaacagtctttgaggttgtaatagctgcctgctgggttctcgggccgggcggtgccgtaaaaccggttgagtatcggcagatcacggctactgatttcctcgccgggggtcagtatggcctgtgtcgtatgtaccatgtctttggcaaacttccccataccgccgccgtagtaggttaagacgtgttcaacgtggctggggttccattcgaagataccccgcaataacgggtctatctcgccattcttgcgctggccagccggtgtattctcgtcgccacctcctaatcggttgatgcctcggcagagatagtatatggccttattcacgtttttaaggcccatttcagatagtgggtagttgttggttgtgccataggagcgacgccccaccggataaccgaaagcatcctcaccggcataccagatgtcataccacggagttagggccgtaggtatcagcacgcgggttgcatctcctttgggggacggtgaagccacgggggagaaatcctcgtacagcagcgtcagcattgtccgggcagcatcttcggccctaactttgccccggtagaggtcatgcagcagcgagcctataccataaaatgcccggaacccttgcggaagtggaatttttaaaaaaccgttctttcccatgtacgggattataaggtggttccgcttctcgtattccgaaacgaccagatcgcggccatcgtcgccggaacccgccaaaaagaaatcgagtagcaggctgtcgaggaacccggcagcggccaatgaagcaacgactttcgcaaatcgcttacggtttttgaacgctacgcgggcaatctgggcggctccttgtactgatgcgttgaaaaagacgtagaacatacccagcggacgtgttgccgttccgcgccggttaaaattcaccgttacgttcttcgcttcgtcaatagctaccagcagcgatttgccctgatcgagtgacgcgaggaatgtagcgaaacgcgaggtgttctcggcgactttcgacgcattttccaatcccgtagctatcgctttcgcaccgcttttctgcgctgcataggagagccagatgccggggcgctcgctgggctgcgctgcttttgcgagctccgcaacgcggcccgtgcggaacgctacataacgcttgatctccttttcagcctcggctacatctttactatgcacaaaacctgtttctccaccattatcccggaaatattcgtagagtgcatccatcacacgctcgggcccgtattgctcgatcaacattttgcggtcggcggtattgagtatgtcgagccgcccgagctctgccaccttcagcggtgcggatttaccgcgcacgttccgcgtgatcgtcgccatgctcgggggaatgttgcgcatgaatccgcgcaggtcgccgccggggtcgatgccatgtatcagcgcggcgtgttgcacgtcacgcagaaagttcgctgctacaaatgccggatttcgggatgtgaacgcttgggccagccagcgtgtcgcgttgcccacggtgtcgtccagccattttgggatagtcagtcggttgtactgattgatggcattggccacggctggatcggcgaatgttaccatgtaccgaatcccgtttacgaaacactctatattgcgttgtcgctcgatggattggcccatgtgcccctcgttctcaaaacggctgtcggcctctgccggtcgcacgatgtttaggcgttcggtttcgtcgatgcggttttcgaggtaaacggccaattcgtcgtcatgggcatttaacgccgcatccagttcctttttcagccgtgcgatttctttgcgtgcagcctgcgatatttctatatcctcaacggacgggttaatagtcgttgttacccagcggttcccaagcccctttgccaaccagaccttatctacgcgaaacagatcatccgagccccggctattgttctgtgccaaacgcagagccgcctgccgtgcccggttggtcttggccgcgatgatagccccaatgccgatgtttaccatttgggccacggggtttcggggcttattcgtgcggccctcggcttcatgtagtacttgccgtagcggtcgcgggccacggatttcgtccataaagtcgtatatttcggttgcgtcgaacgcttgcgggttcccctcgctgtcctcaaagttgtagtcgtaatcgcataagggtacataatatgcccagccgtggccctttatcaactttcggtgttcaggagcgagcatcccatcctcaacgagaatgtcgagtacccgatcattggccgcattgatcgcctgccatagctgttgtgtctgttcgtctccggcccgacggcgaaagtcggcaaccagcttgcgggcatacttatcattccacggatcgcgctgatcttcggagagcgccgcgatgcccgaggcatggcgttcgagtgacgattcggctgtgatatagtcaatgatattatcctcggtcattccggtctgcttggagatacccacaatacaatccaatatggggtctaaatactctttcgtgtacttgtctatcgcggtctttgtgacgcttgataagtggtttaagtgcttgtgtaggtctgtcagatcgtcgatctggccgccgcgctgctttatcacctcttgtagttgctgcacgggcagcgtgctgtctatgagccgggtgtattgacggtttttccaactttgtttgtcgtaaatcaccgtaggttcgatattgccgctgggggccatttcgggttgtttgcgcttctgtttgagtagttcctcaacaaattctccggcatacttgaaattctccggcagcgggcgttcgctggccatcgtccgccgccgtaaggggctgcggtacttatccgacatgacaaattgcaggtgtcggctcatggtgcgcataatctcctgcttggtcgctgacgggagtgtagctaccagttcgtcgatcacccgccggtaactgtctttgtcggtcaatttttgcagatcaaatagtgcgaggtatttgcgcatggatttgagccggtcggggcccatgtggtcgatgatcgttcggcccatgtcgtcgattagggcataggctcgtaatgcgaaatcgttcgcaacgtgttcgttctcgaataatgttccgataatgtgtcgttccttaacatattgctcaacggcatatcgttcgatattctccgggatggcatcgtcgaagatcacgcggtaacgggtgtcgccgggaacgctgtaaagctgctgccggatgcggtgtgcggtggcagcttcggttacggctgcgcctgcggtcttggccgtcatacgacggtgcttcgacaaccatagcatataggcgatgtcccggtcgctgatgcgcagcggcaacctcaacgcctcgcggagcatggagcgtatgcgcccaatgatgcgggcaaagcggctcggggtgatgttcccttcggccagccgcgcaagatattcttctgtggcgagccgccgggcctcaacagccgtcagtttgccggaacgttgtttttgctcttgggccatcatgtcggccacggcccgaacgccggtttcatccagcgacttatgaacgttatcgaggaatagcccgaaccgttcacccagcagggaacgcagccccatgtggccgacgatctcgtgtaatacggtcgcctcggcatccgctcgggtcgtaatattcggcatgacaataaccacccggcctgtggtcgggtcgtagtagcctttggcccgacgtttcctccgcagggccagcgggtcgttgtccgtgatgtgtgtaaggtcggcgacgatctcaaccggtgtgttgagcttttttgcaagacgggttgccgcgtgcgctatggtgttgtcactcgcgggacgttcggggtcaaaccaactactgccatcccggaaccggatgctgtcgcctgcggcatcgtcgagcagttcatccgggtcaatgtctatcgcttcttcgtccgtatcggccttttgttgggcttcgatctcagccagttctgcggccatctgtgcctctaattccgctatccgggcctctgttgcttccagttctgcctgtttcggaaaagccccgctaacctgcgcttgcagccgttcatagtcctgctttgctgtttccaatccaagttggcgggattctatttcctgtatgtaccacttgccagaaatagtataggcaacctgctctaaaacattcgatattttggctccggcatcgccttttatttcaggtgcttcctcgcatacataggatatgccgcggaatatccgaacatctttttcatttgataaagcccacgtttttttaagtcctatctttatatcaaatgtctttccgttgatacggattgtagtttttagctctgcgtgatcgcgttcgggcgttttccgtagtgcatcggcttcggcctcgatgcgcttgtttagtggggcaaagagtttttcataatcgccattttcggctttctgtgagccatattctactgatacgattgtattgtccggaaatatcttccgaaattcgttcccttgcttttcaagtgttgctataacgcccggtgtcgtgtcaagtatattttgcagccatttgaggttgcgggtaacgtatgcctgatgctggtagtggtagtcgcgggcatttctcaacttgcgcaggttgttctgtgcaagcgacaacgcaagtgccgcttggctgccggataatgacgccatcatctgtccgaaattcgtgctgtcgctactctcggcgtcgggttcctccagcgtgcgggatgatatatcgcctttcatcacctgtcggataaacgcctctttgatcttcaagcgttgatagccggttacatcaagcgtttgttttacgcccagccgcagaatacgcaccggtaaatccattttcagatgggaattaccctgccggatgatacgaccaacccgctgcatatagtccattggacggataggcacgtcgagatttacgagaaggtgcaaacgctcctgcatattaactccgataccgagtttttcagtagtacccattactattcgaacgtcgccattgttcacgcgccggaaaagtcgcgctttctgttcgtctgtgttgtagtcgtggataatagcgatctgttcggcagtaatacctgcagcaatgaatttccgctttatgtcctcaaagacattgaaccgccggtcgcggctttggtaagaatcgcagaagatagctgcggtacccttatagtggtcggtggatttcagatcggcgagaatctcccgcacggcattattaaccttgctgcccggttcatccggaagatcgggatttatcagccgaacgtcaatagctgcacgctttgccagcccgaacatcaccaacgggatatggctgttttcccgcttctgtttcgcgggcatagcgtcgaaacgttcaagcgtatcccggatgctgcgcatgactttccgcagggccggggtttgatcgagcattatatctgtcggcttacccccgtcgaggcgcggtgtgccaaccccctcgcgtaagctggatacatcctccgtcaatacgacatgcgcgatctgctgccagatcgccagtaattccggcatattcgaatagctggcgaaacgctgagcgaccttaaatttcccgtttgttccaaattccgcagattcttcgatactcccgaaattgcttgcaaaggcatcaaaagtgtctatgttgtattcctgtaatacgttttgcggcagcaggtagcgcatgaaagtccacatttccgccatcgtgttggaaatcggcgttccggtggcgaggacaacatttttcccgctattattttcaagaatataggttgatttcagccgtagactttgtgcccgctgggacgctgccgggtcgattcctttaatgttttgcaggtcggttgtaaaaccgagtttcttataggcatgtgcttcgtctaccaataacgcatcaatgcctaactgctcaaaggtcatggtttcatccgtgcgacggtcgagtagccgttgagcttgggcccgagcgttagattttaccttttcctcctcttttattgatttttcgctacctacttttttcttctccagcccctcaatttctttcttaatgccgtaggccagtcgtttcgcattgtcgggattgcttgcctcaacctctttcaactgctctaccttttcctcgatcaatccgtcgatatactgattgaccctaataggatcatcgggtatagcatccagataaccgtgatacaaaacgacaatatcccaatcgttgtaggcgattttggcgaaaagctgttgccgctgggatgccgtaaggtctttggcggagggtaccagcacgcgggccgcgggatataatgatttgatttcgtttacaaactgctcataggtcgaacgttgaacgacgatacagggcttatgagctattccgagccgccgcatttccattgccgtcgaaatgagcgtgatcgtttttccggtgccgacctcatgcgcaagtaaggtcgggccttgcaacccacgcataaccccgattttttgatgttcacggggtttcttcgtgtgcgcggcattggggaaatagtcgaatgtcgaaacgtcgatctgacgttcgacgatactgttaaatgccgtattgtatatttcagtcagtttgtcggtggtcgcctcgtcttgttgcttgcaccattgctcgaaagcctcatccagttccgtctgctttatggctgcctgcgccatagcttcggggtctttaactttcttttccttgttcgtaaggctgtcccactccttttttgataggtaggtttgggtcttgttcattcggtcaagcgcgagcctgctgccgggggcatccgctacacccatgctcgcatcgaccgtgttccctttgttggttattcgtgcaatatatttgttagccgcagttttggtgatcttcgcctcaacgttgaacttctcgtgaaaaaaacgttcgtatagctcggttggaacccatgtgctacccagcgaaatttttatctgcggtaacggaacgtccagcgggatgatcttcgacaatgcgcggatgttggcgttgaacaggccgttttcattggcctgttctgcctgtaataatttgtcgcggacattgccggataggtattcgctgcgttcctcaacaagacctgtaacggggttgatatatgcaagttcctgcgtaagcattgcatcttgtacgtcctcttgcgacttatggagtaattcggcgatgtagggcaggtcgaggcggccacggtgataaagcgaaagtgcgattgcatctttctcgttttcggcttttggctgacgtactggctcaatgaccctgcgagagaaaatatcagacttggttatggtaaatcttttcttttcacccggattattcgattcttcgacattttcaatagctgcgattgcgggatagtctacgtcgtcccgcagaaatgtaaggcttgtattctttgaaagtgtaccgtaccggtgggtgaatttggtgtaaagattattaagttctgcccgtaaccgttcgatattcggcaggtctttgttttctgcatcgagtaggtcgtatatggtctttttaagctccaaatactctttcaatactacggttttactacggccctttacgttctggcggttccaatccacagggattgcagacccgaattggactatatgcggtttgccgtcgatcagcgtaagggcaccctctttggtgccatctggggctatcatagtccgagtttgttccggaaccgagggggttacggaatacagatcagtcgggagtgacgcgatgaattgttttataacttggttttggtcgatagccacaaccggaatgcagcgctgctcggtgggacggatttctacaccactttcgaagccgaaccgcatctgcccggccatgaactcgggatgatcgaaataatatttgttgtaaaccatccgtgccgtggcatcttcgcttgtaaatcgacctttatcatttttgacgtacttaatatatggagcctcgcgctccaaaaccgtggtctgcatattcgccgcgtatgacgactgcccggcctcgtcccgtttacggatgatgatgatgtctgcggatgtttcagtacccgcagcttgtttgaatgtcgctgtattcagacgtacagccccgataaaatcggcgttgccgtcggcaacgacccagttacgcagagctgtgctgcggtcgagcgtgctggtggcggtgatgaacacccccagcccgcccggtttgagcttgcgtacacttttggcgatgaaatagtcgtgaatgtcgaacttggccgacaggtctttgtcgaacgtgtcgtgtactttgatcgccccgaacggcacgttcgtaacgatcaggtcgtaccgattattggggatgcgctgctgttcgaaaccctcaacccttacggttgcatccggatagagtgcccgcaggatgcgtccggaaatctcgtcgatttctacacccgcaaggttggattttgcactcaacgcagcaggcataagcccgaaaaagtgtccgatacctgccgacggttccagcacggagccaccggcgaatccaagccgctcgatcatgtcccagacggacgaaacgatctcgggcggtgtgtagaatgatgtagtcgtggatgctcgggccgcctcgtattcctcgggggttaataactcttgtagttcgttgaaataggaattaccccctttaaatacggatgataagccgccccagcccgtgaattgctccaatacggccttttcgtcggcagttgcttcgcgttcctcggcttcaagctgttttaccaatcggatagccgacaggttcgctttgatcttgctgacctcgccgtggggcgcgatgtcgcgcccgcgctctattacatggtttcggctattttttccagatcggcgacgatctcggccatctgttcctcgctgatcgtgattggctcgggttcctccggacagtagtccggtttcagacgttcccggaacagttcttcgactaactgcgggtcgctcccgttcgccagcgccgctttcttccaatccaacgctttgtctacggtttcctctatccacgttaccaactccctcggttcctcgcggtacatacgcagaagcatccccggcaggtattcggccatttcccaaagggctgtccgggcccattcggtctgtattgttcgcagggttttcatggttgtttggttttgtgccgtccgaggcatcgggagtagtgggttccggtgcgttcttacggcgaatatatgaatttaattcgtttttagcaagttcggccatttcaccgacggtaatatctgccggggcatagcggtttggagcatcgagcaggtatgattttgtggtcgtgcagacacggtataggatggggctaccggctcctaatatatcttcaattaccaaatcatcagtatagtcgctactggctatatatccagagggatgaacgggaatatttatgtatattccgtattcggaatccgccggcaagagcgtgatggagccgtcgccgcctgccggtgcgatattagtttcggcatataacgtcttaccttttttgtctgttttatgttcccagcccagcgcctttacgagttctttactgaactgcgtaaggtctttgcggaattttttctcgggccgcagattgccggtttcgtgtatgtctttctccgtggttccagtagtgtcatagcggcctgccagacggcgctgtgtgtcggcttcggggactatggccgggctcggtgctgctccctgtcctgccgcagattgcggcttgtcgaggctgtccagatcaaagtgcatcacgtcgctgtatgtgtccatttgcgcggtatattcttccatgcccggcatgtggagtgcgcctacataggtcggcttgaggtaaggccggatagcctcccccaaatcggcgagcatccgccgggcataatccgcgaatcttcgggccccggcctcaacatggaacgcagccatttgtgtaccgatagcgagtatttcggggtcgaatccggtgttaagctggccgagcttggcccgcatctgccgtttcaattcttcgtatcgctccgacgttaccagcttgttctgggctccgtactcggtcggcttttctgcggcattgtattctgtatcgctttttttctctgcacttaccgccgggacgaggtgtcctgcgttgttgccggtgtatgtttcgggggctgctggcatgtcatttagaggggccggtgttgcctgcatgtcggggcgcttctgctcggctcggaatgcttctgcatcctcagaggtgttgaatagaaaactacgggtgtaactgctataatagccgtcatgtgctttggccctttttttcagatcgtcgaatatagcccgctctacccggtcggccagttttacggagtagagttcggccccggttttggagtgtcgtgtatgttctgttggcttgaagatcgaactttgctccgtcgatgggctcgtagctttcatgctggcgctggcttgggcggcctgcattttctctaattccgcaaatatgctgtggcgggatgtgagtacttgtttcccggcatatttctcggcagcggcattgacctcggcaaccagcttgatagcagcggtagcgtctttctttgccagtcgccgaacatcccgcacgaatccggcttttatcagatcattatgtaagatgctgaaaaccttatccggaaaggtcttgattgcatgggtaaggtattggttatattctgttctgacagccggggtaaactctgcatcggtggactttggcccgacaggggcttgcggggctgcttggggcgtgtcattgaatgataggcgttgttgcgcacggtgggccgcaatcgcatcggcaatgatctttcctttcgacgcttctactttgaatatggtttcttgcaggttgtctatttcagcctgtaaaggttttaggatagtttcaacgacctgctgggagaaatcgcgcggaacgtcaaacaagttgccctctgccgtgttttgcggctgttcgaaaaggatagtttggttatcctcgttgtatgcgctcccgatagattgcttttctcttgtgtattgggcctgtttgcgtttgagtgccgcccggagttgctctacggtggcatcggtggatgcggcggcgtcctcggctacctttcgttcttcgtcggtaaggtcgccggatattgcgtccagtccgcgtccatgtcgaactgctcgcggttcgctttccggttgtccgaaatccgcatcatcacctgttcgggggtcactccgttcgcctcggccaacgtcgctactactttcgccatccgccgcaggcgcaggttgctcggttctttgcgaattgttgtcattggatgtagtctttggtgtttgttctgttgtcggggctggtttggcggccaacgcttcaaagttagcattttccgcaaaattatccgttccctcggtaaataaattgtcaatctcggcccattgttcgggtgtagtctgtccggcccattcgacaaatgcgctgtcgtatagtagttcatcctgcatttgcgccacccgtgcctcatgctcctgcatctgctcgtattcttcgcccgtcatgtcatcgtatgggtgcggctcgatctggtgtagctgtgctgcggccatgtaagcctgccggggtgagtgtatgcgcgaaaggacatccagaacggcatctttgatcgtcatgtcgtccatatcccagcggtagccgttcccctcgttgtttccggccccatactgaaaataaagcctctccgcatattggtcgggtgtcataccgtcgggggataggatgccgacgcgggagcgacgctcgctctcgctaccggagaaccccaactcgcgggcaagtccgcgccgttgaccgttatctttccatgcgaatttaaggccgctggctacgtcgcgcagtatcacgtcctcaatggataggtagtcgcccaactccgcagcgggtttcgcatacggggtcggggtttcacgcttgaatttcggaatatcgggccggggattccgggcgggaaccgcagcggcaggcccctcggcaacgggcgattgcgtggatctcggcatgcccttacttttgttttgcagccgttccaacgcagcggaataaatctgcacttggttcgcgtctgttgtgccgtcgatcatacgctgaatagcacgcggggcctcgtctttgcccacggcggcctgcatggtttctgcgagccgtgcagctacatcttcttggggtgtaacgtccgtaggcatgatgtcggcttgtccgctattcgtgtcattgttgccgaggggtatagctgcctcggtggggtctgtttcttgaatctggcttgcgggccctttgattgtgtggagcggtgccgaaacaaattgtccgtcgtccagttggagcacatagctactgccatgtttgccggtaatgcggccacgcacaccgtctgtcgttacaacctcgtcgccattcgtgtactgcggagcttcgggtgccacaacgcgcactacctcgtcggggtctatgcccgcttcggtgccgatctccatgtcctgtcgctgttgacgcttctggtgttccgctgcggcctgctgttcggagatttgtaactgttctgccgagaactccgcaacgggcgtgcttgcgaagctctcgaactccgcccggtcgatctgtgtcggcgtgcccgtttcggtatcgaggacgaataatgttccgtcggggccctcggtatcgaggttgccggaaagaacgacgtaggctttcccgtcggcgcgttgtccagtgatgatgtcctcggtgggacttttaccatcaacaccacggtaggcccatgcgttcgcagtttgcgctgtctgctggatttgtttgccttgtgtatccccgagctccatgccgtcgaggatttgccgctcgatgtgaaaccgggtatagtcagcagcgtgcgccgcgtcaatctggttgatgtttgccgcctgccaatcaatcgcggcgagcgcttgcgactgctcggccatcgtcggtttttgcatcgcttcgaatacttgcgcccgtaaggtttcattctcaatgcttgaaagcgcctttttctcttgcgttttcaaaacatggttcttgtgggcgtaggatgcgacgttcggcagttcgagggccgagaaccccgcacccatcagcgaggttgtgagaaatgttgtccagaggttctcgccggaaagattttctttccagcgttcatgctccccggtcagcagcggggacatgacacccccggcgacttcctctaaccactcgtctacggggccgttccaaagtgtacggtttcggaaatcggtaaggtacttgctgcgggtatatcccggcaggaagcggtcgagcgagagttttatacccaagcgtcgcccgatctgctccacgggccagcccagcacctttttcactccggctccgagctccccgccgatatgctctgtaaatacgtccgtgaatgaatctgcggcggccttatacatcaggttgtactgcggttcgaggtgttcgacaacctcgccgttgtccttaacctcgtactgtccctgcgcccgttcatggtagtttgagtaggtacccgcctgtaagggtgtcattacagccgcgctcgccgtgtattcgcccagcttgcgaagccctttccccaagagcgttttcgcttcctttttgagcagcattttgccgagggtgttggctccgctgctgccgatcttgctggtggccccgaagcccgccatataaggtaatgaggcggcaatgccgctgccgacctttgcgccggtcgttggcccgccccgttgggccgtgtattggtttatcagttccccataccggagaaggtctatcatgtcccgctccgtaggtgtgagatgttcgccttttgcggctttcttgagcgcccgtgtgatggcgatattctcgcctaactccccaaaccccattgtagcgaggtcgccgagggtgccccaatcgaacacctcacgggcaatgccggatgatttgtccccggcctgcttgtcctttacggttttctggtttaggagcttcaatgcccgctctgtcgcttgcattaggtaggtatcatctccgcccagtccggacggactacggagcgtgcttgatttggcttgagcgataaatgcctttttccatgccggtatatcagcttcgattgcctcgtcaaagggtgccagcatctttgtcctgttggcatcagcccgctgtcgggctcggtcatagatcgcccctaactgctgttgtaaactctctttaataagcccctcgtatacctcgttatccatatccggggtgcgctccgggagtgaaaacggctcaaatccggcgttatcgtcctgctgtaaggctgtctgcataaggtctgccggtgcaacgtccggcaggttgtctccagacggagcatctttgcgtttgcgggtctttcccagaccggagatcgcattaagctgttcgagttgttcaggtgtgagttcggggagtggcatagctattcgtaatccagatagtagttgataatttgttggtcgctgtaaccagcctcacgcatccgttcagcctgcggagtttccagcactttgcgcacatcattcgaaaccgggcccgcgatatagcgtttctcggggcggaacaggagccccagatcggcaggggcttgcggcttctgctttacgccgttcagcttgaggtagacggcacgtaatatctgggctttctgtgccggtttgagcttcccaaagacgaactgcggtaccttttcacccgtgtatgtcggttcttttgtcggggtgccatcttcgggaattatacccatttcgcggcctttctcgtatagcaggctttcttgtgccggattgagccttacgacggtctgttcgtcccgatcgaggaattgaacggcggatttatccgctgccgcagcagatcgggcgctggctgccgctgccgaagctgcggcccgcacttgggctgctttgatgttgttttcgcctcgtaatttttcgactttcattttatcgtccaaagtatcggctcgtttctctttttcctgctgggctttccagaggttgccgatcaatgtgtcgtattgcttttgggccaacgtgtaatcctgcccggcggcggtagcgtccatgttggcggcttgctgctcgccttgttgctggcccataagtgcccgcaggcgtaactgttggtattctcggttctggctgttgtagagtttatcccactcgtcgatctttccaagcatcttcatcggagcatcagtgccggtcttgggaatgtagccctcggtggccatgccgacaatacccgtacccagcgctgataagaaattcgaccacgccgtgatctttgccgccttttccgcgcgttttatccggtcggtgtcctgctggggcttcatcgtgtcgatgaaggccaaaatcgggttctggccgtcccggtacaggtcggtagctcgctggcgtttctgctcccatgtggcgcggcgttcgtcggcttctttttgtcgccgctgtatctcgtcagcaatcgagaataccggtgtggttggcttctcctgttccatactatttcccacctgcaaaatttgctaaaccgccgccggaaccgctgcccataccgtagagcatggctaactggccgagggagctcccgatgccgctaatcatattctgcgtgcctgcggccttgccaagttgcgcttgatagcgcgtccctgtaaggttgtccatgcgggcttgatagtcgcggcgcacttgatctttgtgctgttctccaagccccgcgatctgggcgagggtctgcgaatagtttttgttgagcttgttggcggcggcaacttttgcctcgtccgtagcgccgcttttcacggcgttggtgttcatggcctttagttcgtcctcgttgtagtcccggatgcgtttcagcatggcccgtgaatcagctcggtcgaggtaaggcatattcatttcggagttgtaccactccttgaggttccgctcgcggtcgctgagtatctgatcggccttacgttgctttttattggcagaaatgccgcctgcaatcgacgaagcgacggaaatggcggccaatgcgattaatggaaacatagtgtctaaattttatcactctgtaaaattagcgaccgcgtgtataagaattatccttatttttgatcggaatatatcaataaatcagctacttatgtcgcgcaaaacactcgacgacgatgaaaagaacgcagtctgtgtgagatacgtgcagacggggagtttacgcgccgttgctgccgagttcggaataagtgcgatgcgagtaaagcggttatgggatagcataggcagcgaccagcagcaggtaatacgggcatcggtcgaagaggttcggcaagaggttgaaacggtgatcgtgcaaagcgagctcaccggggactatctggaacgggtgatacaggcccgaaatgcggcaatcaacgagctctacaatcggctgaccaatattgtgcatcgcaacaaaatgacggataagaacctgatagcagcctgtaaaaccctgcacgacatcagcattggggccgagcagcctcagacggagcccggcagcctatttatggtgctgaatcaacgtattcataaggaaatcaataacaactactacttacaagatggaacgaatgaaacaaccagtcccggtgctgggaatcaatcgggcggaaaccgatctgacggttaaggacggaagctgcgaaacgctacacaacctgcgttatgacgcgggcgcttggcgcaatgtcgaagcgtttcggcgtatcggggctgtgacagattttcacggtttcgaactactctataagcatcccatgacggctgacgatctgtatatcgctattgacactaccggagccgttcacgaggtacgctatgcggatggagctttctcctcgacgcagacgatcatgcccgcagtttcgggcctttctaccgtcttttcgttcggacatgtacttgttattgtcacggataataaagagctttattttgtattgtatgggggcgaatatgtccgctttgagatgcccgatccaccggatataagcgaatcaaaggcggataaagttcgttttggagttgatttttattatcgtaggtattgggaaaaccatgatataaaagaagaatttgcagacggggacaacctcgcgcggcatccgaatatagccccggacggtggatattattatacgagaataaccgaccgtgtgaatcaaacgctacacctgcccatgtacaacggagaatactggcagggggctattgctctaatggtggcttataggatgatggacggaacggtcgttgctaactctgagttgatgatatttgcctctgacgccggagacgacggttggcaagaggattatggcgatgttgtggccgacgggatgcctaactacgtgccggaaaaatacagaacgggcattttctttggctgtaaggcaaaaatttcgccgggaagcaatacgttctacattgaaccgcaggtaacaatcaaaattcccgcaggaatagatacccgaatcgttcaaagtgtcgtaatatgctctactcgtatcgtcccaatttacgattttgaaaaaacgtggaaagataactggagcctgtcagatcgcggcggtggcggttattatcagacttatgattttagaaaattgttcacggaagatgttgatttaatgcaagaaccgttatataggatcaaagaaatagaaatccgggactttgtagacaatcgacattcggaatcattgtcttataatgacatgaaaaatgtcgaaagtatgcctgtctacgagcctacacaatcacaccatacgcaagtggggaaatgttactatgagtacaacggcaggctgcataaggcgaatttacgcacgcagctattccccggatattcgcgtttttgtttgggaaatgacggcgaggatgctgcgaattttgtaacgaaaatgatttgtacagtggatattgataacacccgaaagcaggtgtgccagtcaattcgaaatttcaaacctacaagaatccggcgtgtagtgtcataccccgattacagagccattaaatttgcggtttgtaccaacgatcccggctctatggcgcagctttggtggttggatgtgaaccttgaatcctgtaaggggaataactatgcctatgctattccatcgccgacctcacggtctaaatatccgtcgttctggatgcccgaaaccccgatagagcatgaaatctttgaaaaagaggacgatgtatatacagagcctaatcgggtacaggtgtcggcgttgaacaatttgttttcgcagccctttgcaaactcgtatcgtgttggactgaacgaagaaaccatatttgccattgcgaccgtcgtggatgaactgtcagccacccggtttggtgcgttcccgctgtatgtctttaccgaccggggcgtgtggtcgctggaaagcggcaccggcgaggtgctctattcgaacattctgccggtgaatcacgatcagatcgtaaacccgaatacttgtgcggcccttgaaacagtatattatatcacctcacggggcgttcatgccctgcggggacgttcttccgaggtgatctcccgcgaactggagcaataccccggcgaactggccgagtatcttacagaagcccgtatctattttcaattcaaatacggcgatctgatcgtctttaaccgtgcctattcttatgcttatgtatattccatagcagcaggcgtctgggcgacacgcgacatggccgggcgagtgctcaacaatgacgaggttgtgacggcccatgctctcgctacacttaccgacgagcagatgatcgagccggtcgaatgttgggccgtaacacgacctctgaaactcggtacaacggagtttaaacgtcttgaaaccgtcgtagcacgcattatgtcgcaggattgcttcgcccatattatcgtcgaggggtcgaacgactgtaacacatggagcgttctccgtgacgcatggtgtaacgttcagggcatggatgcgaggttgcgcaggacacctctatcatacaagtttttccggctgcgactgcatctgacagctaattgtcggatttcgaccaccagtgtcgatgtcgagttctacccgcgttttgtgggacggctccggtagagtgttacattatgttatattatgttctatttcgtcttattactactacatatatgtaagatgctattaaagtcttgttatatatgtttggttaaaataataatatttatattgtatatagcatataaaaacagtttttaggaaaggaggttgtgataaactgttggttgcccttaaaaaataataacactatcccatcatgaaaaaattattatttctcctaatgattattggtttttatgcatgttcagaggatttgactgataatgtgcttcctaatcaggataaagccgccaataaacaggaaattatgacacgctctgcgatgttagccaatgaatctgttgagcctactgtaaaacttgggaataaactggaaaatccttattctgtaaggaatatgaaagctgctgtaagggctcttaaagcaacaggtaatatagaaattgaggtgccagaatcatctattcatcccactcatttatacattgaattttcgccagaatcaaaggaacaacttgatattttaaaagcagatacgactattgaattttatagttatcctcttgattatgaactgataggcacgggcgtatttgacactgcgggggcccttgaagatacccaagtcgaatcgttatatgcctcgtggccatatggaaaaacactgccgtctaatgttccatattctatacttgaagaattgtatatcccagacgaaaatcttgatgacgaacctattacacgtcccggtatggtttcttctaattttattgaggctcttgtagataaatcacttgaattaactggaaatattgatacggaaccagaaactcgtgcaagtagatattatccacaaggatatattaaagcgtgggatgatatagcgcaggattatgttcctattggtggtgtaaaagttcgagcccgtcgttggtttaccactcgtgtaggatatacggatagaaatggacattatctgtgtcgcggcgatggttttgaacggcctgctaattattctatttgttgggaaagtaattattgggatattagagatggaagcattgtgcaagcattttacaatgggcccaaacagcgtggatattggaatttaaatatcggagggggtaaatctttgcgttatgcaacgctaacaagggcactttatcatcatttctttgggccctatctattcgataagattttgactttacggaaaattaaaatctgttatcgacataaaaaaggagatgaaagaggacattttaaaacccaagcattgagaggtattcaaccggatatagttatctatggagaagatgcaggtggttggcgtcccacatacggtattcttgaaactgcatttcatgaattgggccattgtgcttttttctatcgtgtcaatggaagaaatgcttataaaggctatgtagatacgatacgagaaagttggtctaatttgatcgggtgggcagtaacggaaaatgaatataccttacgtggatatgcccatgaagtgcataaatacgaaacatttttccagccgccaatgtatcacatgctttttgaagtgcctgatgagtataatttccaaagttggtcgaaatacagtataaatacggattatggcagagaatatacaccaatttttattgatatttatgacggctcaaatcaaagggtgtattatcaaaagtatagaccaaataccgatgcaatgatatatgtcaatgataatatttacttgaacgatattgataagttgcagcaggtattatataaatctaagaccatcccccaactcaaagaagcattgaaagaatacaaaggacaatatggaataacagataaatcattggacgatttatttgaattttatttataactttgaaacattaaaagccgtctatatgccagtgagtaaattatgtctattttattttttagtaatattctgtttgggctgttctgacaatagcagccgaaacgaaccacctgtatttgagtatgagtttaaaaatcaaagcggacataaattaacaatccagttaatagatgaatatggtaattttccgaatccgctgatattggagaatgaagaaagcttttcatggggaaattcaaaacacagacccggatttttcccgtttcaggcaaaggaactttgtatattagaatttgatgatattatccgaatctatgcaaatcaactaccggataatagaagcatttttattgaatatggatatcaatgttctgaggtttccgatggcttatcattggcagtctttgtgttcacaaaagaggattacgaatacgctctcgaacatgcaatagattaatgtaagacaacggctggcgttttgccagccgttgtctttttgttgtagttgattatcccgatttttgtccgttcgatccggaagctaacccatgttttcattttccacgggaaccgccccgggcgagggtgtcggcagtaggacgttgtacggcattgcatttggcccgctgactgtcccagaggcggaacagcagacagaccatagccgaaataagggcggcgatcacgcccgaaaccagaaaaacaagtgtttcattcatagctttgatttttttgtggttagaataatttttgtgttacgacagggggcgtataattacaccaaacgcactcctgtacgagcgtcccgctgccgtttacaacggtagaacgtaggttgtttcgttttctggggaaccgcaccatgtaccaatcgccgtataactcctgcatcagcgggcaatcataactgctcaccattgcgtaacctttaatcgagtggagccgcgccgccagcgcccggtgatcgtcgtccgtgaaatcgaaatggtagtcgttctgggagtttcgggatgccaacggatagggcgggtcgcaatagaagaacgcgcccggaaagtcgagccggtcgatacagtcgtcgtagctggtattggtgatctggaaatttttgcggatctcggcggctactgtatgcaactttccaattccgttattccaccggctaatcgtttctccgccttgagcgtttacgtgctgcttggtcatatgccagcctttcgattgtgcttgggcccctaatccgtagaacgattgccgggcccggacatagaagcgtcgcgcctgctcgatcttacccgaatttgtattgccccagctattcaaatattccagttccgagtggggcgtgagtgataatcgtcggataagttcttcttcatggtcgcgcagtatctcgaaaaagttggttatttccccgttgatctcattggctgtccgtataacccggccccgatagttcagcgatacacaaagggagccggcgaaaaggtcgatcaggtgcgtaaagtggggcggaaaattgtcgtagaggtattctaaccagacgaattttcctccgaaataattaaatgcgatcagtttatctttgttaccgctcatattttttcgttttcacggggtgcgttaatctccgaaatctcgtttacagttgcaataggttattcttggattggcccattgcccttgaaaccatttccacgcagggtcgaactgaccgctattatctctatatagcatggcaaagggcataaaccctgcccgccatgcttcgcccatccgtttatgggctttctccattgtgtcacctttgtagccgatcagtatgtagcagcgcagcgcgtgattggatttcgaaaatcctgcatcggtcagcatcttacctgcttcttgcaacggttccagatcgttcggtgtgtcgtaggcgaaaaatagcctttgggggtgtagttggtatagctgcgcggccatttgagaggtcataagggcggcttctaatccgcccgtgaatataggccgatgtggttgtctggccaacatggagaatacctcgtcaatgtgtcggggagagcaggccagtaaattatcatccgagacaatccagccgtccgtaacaggtagttcccgaagctggccgccctcacgtttgggaacagcgcagaaccagcaacggtttgggcagccgcgcgaggtgataacgtagcctttctttaggtacatgcccggtataaagtccccgcccggctcgttgagggctgggccgccgactttcaccggcgcaacgcaagcccattgtttcgctgcccattccgcccatttgaggtgccatgtaaaggcgaccgagatgtgcacctcgtcggcctcgtcaaagagagacggtattgcgttgatgcgcaccagatcgtcgtctggtgtagcatgggttcgggctgggaacacgcggataatacgtttcatatatcgttaaagtctattgttctctgaaacctcaacattccgaaaaactcctttgcggacgtgttcgatacccaccaattaaaaatctcatctgctgttgcttgataattattcatatagccattattgtcgattagatgttggatactgcgtttaattgctttttcaactccgggataacgcatgcgatctttggctttaatttttgttgatgccattggacagaatatgcagcctatacgatgatagccctcgtcataaagtcggcagtatggtaagccttgtccacgaattaaattccagacatcagcatccgaccagcggaaaatcggcgaaagcataattttgtctttgccgttcacacacgcgaagctgcgatcagatcgtcggttgaattggtcgaggctcccgctgaatttatgaccagatacctctaactcgttgcgtgctgcccggcgggtactttctgctgctcggatgcccaaaagtgtgacggttcctgctcctgcctgttcttttagataagcacaacagtaccgaacatgctgtaaagggagcatctgtttctttacgatcagatcgtaaaagttgatcgtcgggcggtgtaacaccacgtcgggatagttggcccgaacaaactgcatgagctccggcgggtcaatagttgttacctgcatgtgggctttgaatttgaccccggccatctttgcgaggtggtataataccatactatctttcccgccggagaatgctaaatgatagccgtctggggacatgcgtaaggccaacgcctcaccacgtcggagaagtgcgatggaatatgcgatcttatgttcgagtgcactcatttcgtttcttaaaggagccctgccacgaggacagggctggagtttttacttacccttttccacgacttttttaaagtgggggtaagggcggaattggggtacacgtttcggaggaatagagagttgttcccctcgtgtgatgtttcggcctactttggcttttcgctctttcggctgaaaaacaccgaagccacgcagaaaaatgcgctggccatcggccacgctactttgaatgattttcataaaatcttctacgaccgtaagcaccatctgggcgctcaaatctcgcttgtccgcgattaggtctactaactctttttttgtcattggcttgggttgttttttagttaatgatttatgtaagggcgtgacgcctttatttgtttcgatatagcgcaccggggagtggcatagtccgggcctgcggttctgccgacataaactatcccggctcgctccaactcgcgcatttcccactctatgatgaacacgggccatcctgtacgctgggatatttccaacgacagggctattgtcggatggcggcgtgccgctcgtttttcttcaacaattcggcatattgtgtcgtacagttctgtcatatcttctgctttcgttgcaatacaacatccatccgggcaaaactgttgaatgtggctattgcgctggtgtgggcggttaatacgttccggcgattcgctatgctctccataagccgctcgacatcgtgccagtcggttattctgtccgtgatgctgcggcagttgtcgagggtcaaaggccgttcaaattccaacatgatcggatagtggcgacgaacccagatatacattcgttcgtgcttggcgagttcgttccaactgcggttgaacatggcaagggccgcccggtcgttttcgatttggttttcccctttaacccctttccatttttcactatgtgtatgtaggtttgtttctgaattatcatctgctttattatcttctctttctctattgtcggagttaatagccgtttcttcggaattttccggtacagcttccgcattgttcggtggaaattgggtttgctgtgcatttcttcggatagtttcgtcagttttcgcccgtctttccgaattttcgggtattctttccgcatcttcggttatttcttccgaagaaatgagggataatgctgcatctataccgcctttacgccgcaaaacggtcataatgtcgaggtagcgggcctgtatgcctttggatgtcagtaagccttgttgcttgagtatttcgcggtcaaataggccgaggtctatgcagtcgttgtatataagtgtcgtgcgctcatcgtcgagcaggcaggtgtcggcgatgtcggcgatcagatcgtcgtccgcagtaacatagtaccctttgtcccggtagatttcacatagcagggcgaggtagacagccagcccgtcgttttgccatcgacgcatcagccgttttaatttccggtcttggaagatgtcgcagtccatccggaaatacactaaaccccgttttacgtttctgcctgccatgttattagcgcaattttcctttgttgtaaagttgctttacggtgtcgagttcgattcgggaataggttactttcgtattcccggcacccggttttatacgggttatccagccgcgatttaaccacgttcgcacgaggctctctccgtagacacggaacgcttcacgctgtgaaatttcgtccttaatcagccccaaacggttgagggcgatagaggcacccagcgcggcgctttccattatcaggttcttctgttcgaatagatcatccatagttttgtgtgttcacctgttcggcatcttcagctattcggagtagccattgatagtgtcgcaggatgtcgggcccaaattggcaagtgtcgatggcttgtccgtctttcgctattgttcgaattgcgtgtgacagatcgacaatcacccgaacgcgcggggtgatttcgtgtgtgattgtctgccagtcacagtcaatcttgatatgccattgagtttgcataagggcatgggggttattctccgagttcgaggctccggaacagttgttgaatttctttgcgagaaagacgagctccatcctgctggtgggcggtgcaaaggatgtagaaatgatcgccttttgaacgtgtgcggaatttcaaccccttacggcccatgcgcggtatagcgtgccgggcattggttaatgcttgtccctctaaagggaatcttttaatctccccgcagccaaatccccctaaaatatcactccatgttcgaggtaattcgccctgtttgatgtgctcgtagtccattttgtatatttgttttaggttgtgtgaaatatgtaaaaatcacatttttgcggtgactataaggtacaaaatgaaaagatagcatacaagcaatttaaaaaggtctcgacatatctaaaagactgacaatcaaataaaatgcgcctgctgctttttagggcaacaggcgaaaaaatgaattttaacaaagaggtttatcgggacgctataagtcgttgccccaatgtgctggatggattgttcggggcaattagggtaatctgctgggtctgaattgtgtttttaatgattgtattcactcgattgctgaaaatgcagtcgattacaagcctgttggcttgatcgacgacatcccaatcctcggtaatgtatatgtgagccagttttgatgcgctgcgcggagagtgcccgagcgcgaaatctataatatcatcccggataccgcagtagttccatgcaaaggatgcccatgttcgacggaaagtgtaggtttctaaatccttaaatccgatgatctttccgatccgtttaagccctatgttcgctgatcggttaaagttatttacactcttgtatagcctatgaaagttgaaaaggcgaaccccggtcggatcacggtatttttcgatcagcggcattacctctggctcaatacggatattgacccgtgcgttgtctgttcggcgatttttggtctttttcctattgtatataaggcgtccgttttgtattccctttgcttcgtataagtctacggtatttattccgatgagcaggaacgttaggatgcctacatcccggcctaaatcctgtaaattgcaatctcctttgcgtacaaatgacgtatcatctgggatggtaagtagttttctgaattgtgctaaactcaaaggctgtttgtctgttgtcgggatgggtggctttttcacctttgagaacggcgagagttgaatgcggataatccccaaatcttcatcgttatattcccttttagctgcattatgcagggcttgtaacgtcgaaaaatatagagagggtgcccgacggcctttcttatggccggggcgcggtggttcttgaataagaaaatctataaatctgccgacgaatttagacgtgatttcccgaatgtctaaattatcccggccaatgaagcgccggagcgcacttaacgccgttccgtacatagtggcgttttgtatgcgccccgttgccttgagccgctctatgtgtaattggccataagcaaagaaatccaatttgaaattttcctcgtctttgaaattctggattaattcgacgatttgcccgacatccatcgtgtcgatcttatcggcgtatttgttgcagacctttctatacttatcaattataggacgggtatcatcaacatacgaggttccccgtttgaaatcgaatttgtcgtttacttctgctgcgctggcgtagtagggggtcggcagataccgcgattgtttattgtgagtgattcgaattttcactctgaacgtcccgtctgctcttttgtacgggggatgaataacggttttaaaagtcggcataaggcaagaaatttttataaaactattagaaaacttcttacagcaaatgtacctttcaactgctgattatgcaacaaaaaaacagcgtccgaacataattcgaacgctgttaattagttaaaaatcagtgcaaatgaatgatttgcgtattttttgccgtttggcctctttttgcgattagcaaaccggtggtttcagccactcacccacctctccggacacgccttccggctgttaactccgaaagggtgtgcaaatatagaatctttttagggaaatacaaagaaatgcggtcaaaatttgtatttttgcgtaaatcctcgcaccccggtttgaaacgcatccgttgcatattacatatggtgtgctgcttttgtcgcggtgtccgccgcagcgcagcctgcgccggaaaaccgtttcgggcggccgctcgccgaggtgctgcccgaagctgcgccgtgcgctttcccgggcggactgcccccggcggctctcccaagctgtgcacgaccggaacgaatcatcgaaaaactggaatagccatgaaacggattctcttgcttttgctggtcctcggggccgtttgcagcctgaatgccaaaacccggaaatgcctctaccgtgtgacggtcacgggcaagcgcgccgaatgtccggtcgtgatccgcgatgtgcccgagtgggcgcagagcgccgtcgtgtcgctcggcggcgttcaccggattccctcccagctggaccgggaactggacgaactggtcttcgtctctgacatttccggcagccagaatttccaggttctctactcctcggaccccgacaagcgcgttttcaaaaaacgcgtacatgcccagatgtggctcaagaaccccgacaagaccctgcgagccgtcggctgcgcctccttggagaagaacgacatgtaccataaactgcaccaccacggcccggccttcgagtcggagtacgccgcctaccgcatctatttcgacaacaagcagaccgtcgacacctacggcaagaagcgtccgcagctcgagctggccgagacgatgtggtatccttcggacgagcagctctcccgcggctacggccacgacaacctgcgcgtcttcgggtcggtgggcgtggggacgctcaagggctgggacgccgaaaagagaaagatggtccacatcaccgatttcaaacgccgcgaagcccgcattctggccgacggacccatccgcacggtggtcgaaatgcgggtcgaagggtggcgctacggagggcgcgagatcacgatgacctcgcgctacattctctacgccgggcacggcgacgtgcaggtcgaaaaccgcatcgagggcgacctcaggggactggtcttcacgaccggcgtgatgaagatggccgaaagcgaggtttgtaagaacgataacgtgatcgccgccttcgggcgcgacttccccgaaaacgacaccgtgaagtgggagcgcgagagcgtcgggctggccgtcgccgtgccgcagaggcagatcgtttcgcagaccgacgacaagaccagttacctcttccagctcacacccgatgcccgcggacggatcgactacgcgttcgagatgatctggcgcaagagcgaatggctcaaggaccgcagcgataccgaatgcgtcctgggactgatggagtcggtgggggcggcccggaccccggtcgtcgtttcgcggatcagacagttttgagaaaaagtgcatcgtttgcgtcaaaaaatccctgtccgataagcgggggcagtgtacttttgtatacctgaaattgcgaaaattttacgtatacgaataaaaccatctctcttatgaacttcagacaagtgacgatttgcgcagccgcggcgctcctggcagccgccgcaggatgccgcgcacacgccccggcctgcaaccttccgttcgagatgccgcaggttgcccggcccgcgattccttcgaatgcggtcagcgtcgccgactgcggcggctcgggcggcggcgacgcgggaaccggctatgcgatgaccctctcggccacggcgggtgtgctctcgtccaacatcacgggcctgccgaccagctgggctgccggcgacagtacgtggacggcgaccgacgataccgggaccgccaggtagccggaaggcttcgcatgaaagaggcgcggaacattccgcgcctcttttttgccgtttgaccgttgcggaaccggatttgcaggggagatggtaaaaatgtaaatggaattttgtatctttgcatgatatttcgcttgtaatggcagaaaacgagaaaaacatactggagaatatcggagagcaggaatacaagtacggcttcacgacggacatcgaaaccgaaaccatcggcaagggtctttcggaggaggtcgtgcggctgatctccgccaaaaagggcgagccggagtggatgaccgagcggcgcgtggcggcctaccgccattggctgacgctggagcctccgacctgggcccacctgacgatccccccgatcgactttcaggacattatctactacgcggctcccaagcccaaaaagcagctcggttcgatggacgaggtcgaccccgagctgaagcgcacgttcgacaaactgggcatcccgctcgaagagcagatggctcttgcgggcgtcgcggtcgacgccgtgatggactccgtgtcggtcaagaccactttcagggaggtgctggccgagaagggcatcctcttctgttcgatctccgaggcgctgcgcgactttcccgagctggtgaaaaaatacctcgggagcgtcgtgccctataccgacaacttctacgctgcgctgaacgccgcggtcttctccgacggctcgttctgctacatccccaagggggtgcgctgcccgatggagctgtcgacctatttccgcatcaacgccgccggcacggggcagttcgaacgcacgctgatcgtggccgacgagggcgcctacgtgagctacctcgaagggtgcaccgcgccgcagcgcgacgagaaccagctgcacgccgccgtggtcgagatcgtggtcgagcgggacgccgaggtgaagtattccaccgttcagaactggtatcccggcgacaagcagggccggggcggcatttataacttcgtcaccaagcgcggcatctgccgcgagaacgcccgcctgtcgtggacgcaggtcgagacgggttcggcgatcacgtggaaatatccgagctgcatcctcgcgggcgacaactccgtcggggagttctactcggtggccatgaccaacaatttccagcaggccgacacggggacgaagatgatccacatcggccgcaacacccgcagccgcatcgtctcgaaaggcatttcggcgggccggagcgagaactcctaccgcggcatggtccgcgtggcgaagggggcggagaacgcccgcaactactcgcagtgcgattcgctgctgatcggcgacaagtgcggggcgcacaccttcccggtgatcgacgtgcgcaatcgtacgggtgtggtggaacacgaggccacgacctcgaaaatctccgacgaccagctgttctactgcaaccagcgcggactctcgacggaagacgccgtggggctgatcgtcaacggctatgcccgcgaggtgctgtcgaaactgccgatggagtttgcggtagaggcccagaaactgctggccttgcagttggagggcagcgtagggtagtttgctgtttgcgtctgcaatccggtcgcatgcgataagcccctcccgagggaggggtttagggtggggtcaggcttgcaaacacggcggaacgccgtggaaacgacctgcgagagcgaaaaaaggaaacgagaataatagtaagttgatgatatgttaaaggtaaaaaatctgcacgcctcggtcgacggcaaggagattctccggggtatcgacctcgaagtgaaggccggtgaggtgcatgccatcatggggcctaacggctcgggcaagtcgacgctggcgtcggtgctggcgggcaatgagaaattcaccgtcaccgaagggtcggccgagtttctgggccgcgacctgctgtcgatgcccatcgaggaccgggcgcggctggggctgttcctgggcttccagtatccggtggagatcccgggtgtcacgatggccaatttcatgaagctggctgtcaacgagcagcgcaagttccgcggcgaggagccgctttcggccgccgaattcctgaaactcatgcgcgagaagagcgccgtggtggagctttcgtcgaaactcacctcgcgggccgtgaacgaaggcttctcgggcggcgagaagaagaagaacgagattttccagatggcgatgctcgatccgaagctggcgatcctggacgagaccgactcggggctcgacatcgacgccctgcgcatcgtcgccacgggcgtcaccagactccaccgggcggacaacgccacggtggtcatcacccactaccagcgtctgctggattacatcgtgcccgacgtggtgcatgtgctctacaagggccgcatcatccattcgggcgacaagtcgctggcccttaagctcgaaaaggaggggtacgactggctgatcaacgaatacgacaagtgatggagacgattccggacatcatccgcgggttccgcgcggcggacggcgaggtgctccgcatcgccggagccgaggccgaaccctttgcggcggtcgatccccggcatctgcacgtggaggctgcggcgggcgcttcggcgcggatcgtcgtgctgcataccgcacccgacgtgtcgtcgctgacgctcgaactggccgaaggggcgcagctggagctgaccgaactgttcacggccgaggcgttcgccgaggtctcggtgaagcaggccgcccgcagccgctgccgcctgacgacggtgctgctgtcgagcgccaacgcttcgtaccgcatcgacctcgacggtgcggatgccgaaaacgagctgggcggggtgttcctcgccgcgggtgaagagcattgcgtgctgaaactgcatacggcgcacaacgtcgccgactgccgcagcgactcctacgtcaagggggtcgccggagggcaggccgtgggcgagttctgcggaatggtctacgtggctcccgacgcccagcgcaccgacgcccggcagcagagccgcaacatcctgttgagccggacggcccgcatcacgacccagccgcagctggaaatctacgccgacgacgtgaaatgctcgcacggcgcgacggtggggcagatggatgccgaggcgatactttacatgcgccagcgcggtttgagcgaagcccaggcccggcggttgcagatcgaaggattcgtcggcgacgtggtgacccgctgcggcatcgagccgctgtgcggggcgatcctggaacgggccgcggcgaaaatcgaaaccctgtgagaaatgttcgacgttgaaaaaatacgggaggagttcccgatcctgcaccgcgaagtctacggcaagccgctggtttacctcgacagcggggctacggcgcagaaaccccggacggtgatcgagacggtcgatcgccttcaccgggagctgaacgccaacattcaccgcggggtgcatttcctctcggaggaggcgacggtgttgtatgaagccgcccgggagcggatcgcgtcgttcgtcggggcggccgaaaaggaggagatcgtcttcacggcgggcgccacggcgtcgctcaacacggtggcttacgcctggggcgacgccttcgtcggagcgggggacaacatcctcgtcagcgagatggagcaccactcgaacatcgtgccgtggcagatgctggccgaacgcaagggggccgaaatccgcgtgcttccgttcgacgaggcgggagcgctgcgcacggacctcctgccgtcgctcgtggacgaacgtacgcgcgtggtggccgtcacgcaggcgtccaacacgctcggcacgcggcccgacctgcggacggtggtcgaagcggcgcatgccgcgggggccgttgtcgttgtcgacggctgtcagggcgtggttcacggcggggtcgatgtccgggcgatggactgcgacttctacgccttctcgggccacaaactctacgggccgacgggaatcggcgtgctgtacggcaagcgcgaactgctggaacggatgccgccgttcatgggcggcggcgacatggtcgacacggtgacgttcgcgaagaccacctatgcccccgtgccgctgaaattcgaggccggaacggccaatttcgtgggcgccatcggactgggcgaggcggtgaagttcatgcagcggttcgaccctgcggagatcgaagcccacgaggaggcgctgctgcgccgcgccacggagcggctggaggggatcggcggactgcggatttacggcacggcgcccggcaaatgcgccatcctctcgttcaatgtcgagggggtgcatccctatgatatggggatgattctcgacaagctgggcattgcggtccgcacgggccagcactgcgccgagccggtgatggaccactacgggacgacgggcatgtgccgggcctcgttcgcactgtacaatacgcttgcggaggccgatgcgctggccgccggggtcgaacgggccgtgaagatgctgcgcaactgaaaattaaaaactactacctatgttcatcgtactcgaaggcttggacggagcgggcaagtcgacccagatccggatgttgcgccagttgctcgcagaacgtggcgtggagagcgaatacgttcattttccgcgtttcgatgcgccggtctacggcgaactgatcgcccgcttcctgcgcggcgaattcggcggcgtgaacgaagtcgacccctatctggtggccctgctcttcgcgggcgaccgggcggcggccggcccgcagatccgggcgtggatcgccgaaggcaaagccgtggtcctcgaccgttacgtctattcgaacgtgggtttccagtgtgcgaaactacctgccggcgagcggcgcgaccgcctcgcgcagtggattctggacctggaattcggttacaacgacctgccgcgccccgatctgtcgctgttcctcgacgtgccgttcgccttcaccgaacgaaagctcacggaggtccgcgagggagacgaccgcgactacctgcaaggcagccgggacattcacgaagacgctctcgacctgcaacggcgcgtgcgcgaggtgtacctcgccgccgcggcgaaggacgattcgctgcgtgtggtcgattgcagcgatccgtcgggggcgatgggttcgcccgaacataatttcgaaaaaatacgggccgtgctggccccgatactcgacgcgcgatgagaaagacccggactttcaaaatcgcggccaacgtctgccggctgatcctcgcctgcacgttcatcgtttcgggtttcacgaaggtgatagatccgtggggcacggcgctgaaggtcaacgagtacctttcgatctacggactcgactacctgcagcccggggcgatggtcttttcgatctggctgtgcggagcggagctgatgatgggctgcatgctgctgttcaaggtccgtatccggctgatttcgatcttcgccgtgctgtcgatggttttcttcacgctgctgacgctgttgagcgccacgctcatccccgtcgaggactgcgggtgcttcggcgaggcgctgaaacttaccccgtgggagactttcgtcaagaacgtcgtgctgctgccgatggccttcgtggtgtggtggcgttaccggcccgacaagattttcgccttcaaaccgctggagatcgtgcttacctgcacgttcttctttctggcgatgtacctcggctattactgttacattcacctgccgctcgtggatttcctgccctataaggtcggggtcaatatccgcgaggcgatgcaggctcccgtcgtcgagccgggcgagtcggaaaccgtgctggtctaccgcaacaggcggacgggccgcgagcgcgagttctcgctggaagacaccgagtggcaggatgccgaaaaatgggagtgggtcgacacccgcaccacgagcgaagtcccggccgtgagacctcttgtgagcgaattcgccctgcgcgacgccgagggcgacgccacggaggaggtgctgacgatgccggggcgggtttacatgctctgcgtcacggctttcgaccgcctgccgcgttcgtgcgcacggcgcatggcccggcttgcggagcgcgcccgtgaggagggtgcgcacgtggtctgcctgacgcccgatccgctttacggcgtcacgtggcacgagttcggcacggtggaggtgcggtgctacaacatcgacgcctcgacgatgaaaaccatgctccgcgccgataacgggcttgtcgtgctggacgacggaaccatcacctctaaaaagaactgtcgcgatattcgtccgtaggggcatcctgcgggacgctggtatgaaagttgacgccggaaacggtgtcaacttttttcgtatgcgaatcatccccattttagcgatcgccctgcttgccggggcgtgttcccgtaagacgcccgcacctgcggtggtacgccccgtgaaggtggcgacggctgccggcgcgggacttatcgacaaggatttcgccggcatggctactcccgacgacgctgtgaacctcgccttcaaggtggcggggcaggtcctcgacgtgcccgtttcgcagggcgcgggcgtgaagaagggggagctgctcgccgaactcgacccccgggacatcgagttgcaggtcgcggcgacccgctcggccttcgaggagacccgctcgcagcagcagcgcatgcagcggctgctggagcacgaggcggtgtcgcggcaggaggccgaagcggccgcgacgcgctatgcgcaggcccgctcgacctacgagaacaccctcgacctgctgaaggacacccgcctgaaggccccgttcgccggggtcgtcgagcgcaagtacgtcgataatttcgaacgcgtgcaggccggacagccgattctccggctggtcaatcccgtcacctcgaccgtccagttcacgctgcccgaaaacgcgctgccgctgttgcgggacagctccacgcgctttaccgtcgcgttcgacaactaccggggcgcggccattccggcccgcctgaaagagtatgtcgaaacctcgtccgacgcctcgggattccccgtgtcgctgactctcgaaaaccccgatccggcccgttaccgcatctcgcccggcatgtcgtgcacgatcaccatgttgagcgccgatcccgttcccgatgccgtgtcgctgcccgtttcggccgtctacgccccggccgggggcgggacctacgtctggatcgtcggcgcgggcgaccgcgtcatgcgccgcgaggtgacgctcggggagctgttcggccgcgaccgggtggtcgtcgacagcggtgtcgcgcccggcgaacgggtcgtcacggcgggcgtttaccagctgcgcgagggcgaacgggtccggatcttaaactgacgccgccatgaacctgcccgaatattcgctgcgcagcgccaaggtgatctggttcttcctcgccgtgctgctggcgggaggcgccctggggttcgccacgctgggcaagaaggaggatgcggtcttcgtcatcaagtcggcgtcgctcgtctgctcctatccgggggccacgccgcagcaggtcgaggagcttgtcactgaacccatcgaacgcgaggtgcagtcgatgcgccgcgtgcataaaatcacttcggaatcctattacgggctttcgaagatacaggtcgaactggacccggccacacccgccgccgaaattccgcaactgtgggacgaactgcgccgcaaggtgctcaacgtccagccgcgcctgcccgcgggggcttcggcggtgaccgtcgccgacgatttcggcgacgtgtacggcatctactacgggctttcggtcgacggaggcttcacctggtccgaactgcgcgactgggcgcagcggctcaaaacggcgctcgtgacggtcgacggcgtgcagaaggtggccctctacggcgaacagacgcccgtggtgaacgtctatgtcagcatggcgacgctggccaatttcgccatccgtcccgaaaccatcgtcgcgaccatcggccagcagaattccatcgtcgacagcggcgagaagcaggccggaaaactccagatacagattctcgaggacggaacctacaagacgctcgacgatctttcggaccagctgctgatctcctcttcgggcaaacagtaccgcctgggcgacatcgcccgcgtcgagcggggctacgccgagccgccgcagacgatgatgcgcgtcgacggccgccgcgccgtgggcatcggcgtctcgaccgaggagggcgtcgacgtggtgaagaccggtgcggagatcgaatccctgctggcttcgctcacgcggcagatgccgctgggcatggagctgacggtgctctatcccgagaaccgcatcgcccgggaggccaattccacgttcattctcaacctcgccgagtcggttgcgatcgtcattctgatcatcatgctcgtcatgggcttccgcgccggggtgctgatcggcagttcgctgctcttctcgatcggcggcacgctgctcctgatgcagtttctgggcgaggggctgaaccgcacctcgctggccggtttcatcatcgcgatgggcatgctcgtcgacaacgccatcgtcgtcaccgacaatgcacaacaggccatgctgcggggcgtggcacgccgcacggccgtcgtcgagggagccaacgccccgcggtggagcctgctgggggccacgctgatcgccatattctcgtttctgccgctgtaccttgccccctcgtcggtggccgaaatcgtcaagccgctgttcgtcgtgctggccctctcgctgctgttgagctgggtgctggccctgacgcagacgccgctgttcggcaatttcatgctcaaggtgaaacccgtcgccggcgatccctacgacacgcgcttctaccgcgccttcgaccgcctgctggccgtcctgctgcggtggcggtgggctgtcgcggcgacggtcgcggggctgttcgtcctgtcgctggtcgttatggggctgatgccccagaacttctttccgtcgctcgacaaaccttatttccgggccgacgtactgctgcccgacgggtataatatccgcgatacggagcgtaatctgctcgccatggaggagtggctgcgcgcgcagcccgaggtgaagaccgtctcgatgacgctcgggtcgacgccgccgcgttactatctggccagcagtagcatttcgttgcgtcccaatttcggcaacatcctcgtcgaactgcacgacaagcggcagaccgaggccgtcgaggagcgtttcaacgcctatgtcaccgcgaattttcccgacgtgtggctgcgctcgtcgctcttcaagctctcgcccgtgcctgacgcggccatcgaattcggcttcatcggcgacgacgtcgacacgctgcgccgtctcgcggcccgggccgaagaggtgatgtggcgcacccccggagccgtaaacatccgcaacggctggggcaaccgcgtgccgatgtggcagccggtctactcgcagatgaagggccagcgcatcggcatcacccgcagccagatggcccgcggcatcaccatcgccacgcagggctacacgctgggcgaataccgcgagggcgaccagttcatgccgatccttctgaaagacgagaacatcggttcgtataacctgaccaatttgcaggccctgccgatcttcaatccttcgggcaaggtcttttcgatcgagcaggcgaccgacggattccgtttcgatttccggccgggcgtcatcaagcgtttcaaccgccagcgggtgatgaaggcccaatgcgacccgggccgcggggtcaacaccatgcagttgttcgccgcgctgcgcgattcggtggaccgcgccgtggtgcttcccgagggctactcgatgaaggtcttcggcgagcaggagagccagcaggagtccaacgaggcgctggccgaatacatgccgctgacgctggtgctcatcctcatcgtcctgctgctgttgtttcgcaactaccgcgagccggtcgtcattctactgatgatccccctgatcttcatcggcgtggtgctgggactggccgtcacgggcaaggtgttcaactttttctccctgctggggttgctggggctcgtcggcatgaacatcaagaacgccgtggtgctcgtcgagcagatcggcgtgctgcgggccgcgggcaaagacccctacgaggccctgacctctgcgacacgcagccgtatcgtcccggtggcgatggcctcgggaacgaccattctgggcatgctgccgctgttgttcgactcgatgttcggcgcgatggccgccacgatcatgggcggactgctggtcgccacgctgctgacggtctgcgtcctgccggtggtctacgcgctgttctacaatatccgcaagccatgaagataacagtttcgataatcgccctttggctctgcgtcccggcgctggggcagacttcgctcgccgactaccgcgctgccgtcgccgattacagctggcagctgaagatcgcggcctcgaagagcgatgcggcggccgagacggcggggcaggcccgcacgggctacttgccgcggctcgcgatggacggcagtttcacggcgaccgtgcgccatttcgacggcgtggaacgctggacgttcagcctcctgccgcagctggtgcagaccgtctacggcggcggtgcggtgcgggccgcggcccggcaggccgaactgggctacggcatcgcgctgtgcgacgaggagttttcgcgcctcgacgtgcgctatgccgccgactacgcctactggaacctctcggccgtggaactctatgccgcctcgatgcggcagtatgtcgcgatcatccgttcgctcaaggaggtcgtcgaccgccgcttttcggagggctatatcgccaagggcgacgtgctgatgatcgacgcacggttgagcgaggccgaatactcgctcgtgagcgccgagcagagttacgaggtcgcgctccacaacttcaacatcctccgcggaaccgacgccgcgctcggcgtacagctcgcgcagggcatccgcgactcgctgccgatgcccggacgggtcgtggcggccgaggcgctggagcggcgtcccgactatgccgccgcacggctgcgctcggagcaggccgaggcgggaatccgggccgtccgcgcgccgttcaatccgcagttgagcgtgggtgtcggcggcatgtggcagccctattaccccaacagcacgggtgcgacctacgtcgacggatcggctttcgtgaaactctccgtgccgatcttccactggggcgaacgccgccgggccgtgggggccgcgcgcgccgtgcagttgcagcaggagtggaacgccgcgctcgtgcacgacgacatcgtgcgcgaggagatgaacggctggacggccctcgtgcagagccgcgcgcaggtcgacgcctcggaagagagcctccgcatcgcgggcgagaacctctccatcagcacctattcctacggcgaaggcctggcgacgatcctcgacgtcctgcaagcccagctgagctggattcagctctattcgaacgccatccgggcgcattacaactatgccgtggcggtgtcggactaccagcgcatcacggcgcaatagaaaaacggcggagaatctctccgccgttttttcctgccgccgggcgttctacgccttcgccggctgggtgctgaccaccgcgatttcgcgcgacacgggtgcgatcctgcgcagcatctgcaccatgccgcagtacttttcgtgtgtcagttccagtgcgcggccgaccttcgcctggtcgtcttcggagctgcattcgacgttgtaaaccacatggaacgagcggtatacgctttcggattgaaccgtctcggcggataaatcgcccgaaaagctgatttcgaagcgtttgggcgtgatgcgctctttctgcatgatcatcagcgccgtctgggcggagcattgcgccgcggcgtagagcatcagggtcttgggattcatcgcgtcgcatccggtgccgttttcggtccggaatttcccgttttcggacatctgtaaagttactttttcaatcatggatttcggtttttgtgttcaacaataacccgggggcaaattccgttcctttggtagtgtgcggatgggcaaaaattcgtatatttgcccgtatttagtgaaacaatgcatatgcgaaaattccggatttcattgctgacccttgcccttgcggcgtgcgccttcggcgcgcaggctgccgggcctgaaatagagaccctcgcggggcgcgcccgcgacctgttcgattacggccgctggagcgacgcccggcaggaattcctgcgcgtcagggcggcgctgacgccttcggaccgcctgctggcccaggaggcggatttttacctggccgcctgcgccgtggagctgggcagccccgatgccgaaggggccttgcgcgaattcgcggagcgttatcccgaatcggtctacgccaacgacgtgcgtttcgcgctcggttcgttctactgcgccgcggggaacatggaaaaggcccgcgaggctttcgcgcagaccgattacaaggcgttgagcgcgccgcgccgcgagcagtacgacatccgcatgggctacgtcgcgttcgccgggggcgactaccggaaggcgtacgactatttcgaccgcatcggcagccgcagcgaatacgccgatcacgcccgttactacaaggcctatatcgactacgccgaaggacgttacggccgtgcgaagcaggccttcacggcgcttctgcgcagcgacgcctaccgtgacgtggttccctattacctcatgcagatcgagttccgcgagggcaactaccgctatgtggtcgaaaacggcgagatgctggcccgccgggccgttcccgagcggcgcgccgagctggagcgcgtggtcgccgaatcgtggttccggctggaggatttcaacaggacgctggagcacctcgcggctttccggaaggccggcggggagatggaccgcgacgccagctacctggagggcttctcgctctaccgcacggcccgctatgcggaggccgcggagtggctgcgcaaggcgtgcggcgctgaagacgcgctgacgcagaacgcctcctaccacctggccgactgttacctgcgcgccggggacaaggagtcggcgatgcaggctttcgcgatggcttccgacgagtcgctcgacgcgacggtggccgaggacgcgctgttcaactacgccaaattgcagtacgaactgggcggcggcgccttcaacggcgcgatcaacgtgctgacgcgctatgtcgaacgctatccttcgtcgccgcgcgcggaggaggcccgtgcgctgctgatcgccgcttactacaactcccgcgactacgatgccgcgtacagggccatcaaacagatgccctcgggcgacgccgacatccgcgcggcgttgcagaagatcacctatttccgcgctctggaggcctacaaggcgggcgacatgcgtgcggcacagcgttacctcacggaatccgccgcggtgaacgtcagccccaagtacaccgcgctgaacgccttctggcagggtgaaatcgccttcgcacagggcgactacccggtggcggcggccaaatacaacgcctacctgaagcgtgcgccccgcaccgagcgggagtatgcgctggcgtggtacaatctcggttactgcgccttcgaccgcaacgacctggggcaggcgcaggcttcgttccgaaagttcctcgccgcctggtcgccgcgcgaccgttaccgcgccgacgcctacaaccggttgggcgacgcggcctattccgaccgccgtttcgaggaggccgtgggggagtatgacaaggccatcgccctggcgacgcccgaacagcagtacgcccgctacaaacgggccgtgacgctcggcatcctgggccgcacggaccagaagcagcaggccctgcggcagatcgccgcttcgggcggcgactatgccgacgaagcctcttacgagctgggacgcagctacatcgcgcaggagaagtatgccgagggcgccgcgcagctcgaaaagttcgtggccgcctatccgtcgtcgccgcgctgcacgcaggcgctgtccgacctcgggctggcctacctgaatctgggcgacaagcaaaagtcgctcaagtattacgatcgggtggtcggggcgtcgccccactcctcggaagccaggggcgcgatgcagtcgatccgcgagatctacgtttcgcagggcgacgccgacgcctatttcgactacgccgccaaggccggactggagagcgacctgacggccctttcgcgcgactcgctgtcgttcgccgcggcacagaaactctacctcgacggacagcaggaggctgccgcgaagtcgctgcgcagctatgtgcagagctatccgaaggggtattacctgaccgacgcgctctactatttgagcgactgctacctccgctcgggcgagcgcggggaggccatcgagacgctcacggcgctcgccgaccgggggacgacccagtacacggtcgccgtgctggagaagctctccgagatgacttatgccgacgaacgctgggacgaggccgcctcggcctaccgccggctttacgacgccgcgccgaccaaaacgggccgcgaggaggccatgaagggctatgtgcgtgcgacggtggccgggggcgacggggcgaagatcgccgcgatggccgccgacgtctgcgggcacgacgatgcgggggccgcggcgctccgcgaagcgaagtacgcctgggccgggcagctgcgcgccgaaggccgccgcgacgaggccgtgaagctctaccgcgaactggcgaaggacgtgcgcacgaaagagggttccgaggctgcctattacgtgatcgaatccacgttcgggagcggcgacatggacaagaccgaaaaggaggtcttcgccttctccgaacgggagccgcaggcctactggctggccaaggcctttatcctgctgggcgacgtgtatgtgaagaaaggggataatttccaggcccgggcaacgtggcagagtgtcgccgacggttattcgcctgccgacgacggcatcgtggacgaagcgaaggcgcgaatcgcaaaactcaactgacgatgaagaagatgctgatagtggccgccctcgcggcggtgctgccgcagttggctgcggcgcaggtcgaaaagcaggtcgaagtgaccaaggcctatgtcccgaaggtggagagcgcctcgaaactggccgtccagcccgacatgaccgacacggcgcgcatgcgccccgaaatcgactacaccattacgccgctgtcgttgcgcacgacgctctcgccgcgtccgatccgccccgcgacggtgacctactgggagttcaaccgaccgctgcccttctacctgaaggccggggcggggtatccgctcaactcggtgctggacttctacgcctcgtcgcagaatccgtcgacgggctacgtcgtggggtacgtcaaccacgaggggcggtacgccgatattaaaaacgatttcggggtgaagaacaattcgacgcggatgttcaaccgcatcggggctgccgcgggcaagtatttcggccggcacatcctcgaaggcgacatttactacgacaaccggatgtatcaccgttacggggcctgggccgacggagacggcgcgggcctcgggatcggggggatgaacgactacggcgatgcgaacgtcgcggtgcgtttcggcgacaattttcaggacttgagccgcacgaactttgaaatagccctgcgcggggggatgttcttcgaccactccgagtggccggattacggcgacaaggcccggcagaccgcactcggggccagggcgaagatcgcccggggattcgggcgcagcaggttctcgctcgaagcgggatacgaattgcggtccgggcagaaatcgctggagggcagcagccagcagctgatccacgccgccctgcgctacggtttcgcaggcggggtcgtgcgcttcgacgtgggggccgactactaccgcgaccggaccgagttcgaaggagaaccctcgaacctcgtgaagagtgaaaattatgtcattcctttcgcccggctcgatttcaacctcggaacgccggggctgaaacccttcttcgaggccgacggcgcggtgacgccgaacgacttccgggcgctgacgctggaaaatccctatgtcgcctcctcgacgtggctcgacaaaagttccgtggactacaatttccgtctcggactgggcggcagtctctggcgcagccgcttcgactaccgtgtctacgccggggtgtcggtccgcgacaaccatcttttctggaccacgtatcggagtttgtcggacgatcctgctttttcggaggtttttcagggcgttctggtccctgtgatggcgcggcagaccgtcacttcgttcaacggcgagatcgagttccggcccgtgagcgcgctgaaattcgacctgggcgtgcacggctacctctataacgacgagacggacctgaaaaacggcgctccgtcgttcgccgggaacgtgggcgtcgcctacgagggccgcaaggtctcgttcggggtgaaggcgctgatgcagggcgtgcgccgctggacggtgatcgacctttcggctacgaccgacgcttcggaaccggtctgtggcccgtctttcgaagcgcccttcggcgtggacctgcgggtgaatttcgactggaaggtttcgggccgcgtgacgctcttcgccgagggccgcaacctcgtcaaccgccgcctgtacgaatacccctggtatcccgaactgggagccaatttcacggtgggcgtcaaggccaatttctgaaaccgtttccgccgggagcggttttccggaacgggggctttttcgaaaagcccccgtttttttgcccctcgcgaaagacgacaattcgtttaattgatgatcattttcggctgtcgggaagaaccgaccggaaatttcgctatattggagcgaatttaattcacacgaccatgaaacatacaatgcccgagcttccctatgcaccggaagcgcttgctccgaagatgagcaaagagaccttcgattaccactatggaaagcatttgcagacttatgtgaacaacctgaacaacctgatcgcggggacgccttacgaggagatgccgctcgacgagatcgttcgcaaggccgacgggggcattttcaacaatgccgcccaggcctggaaccataccttctttttccggatgctgactcccgcgcagcagccgatgcccgcgaagctggccgccaaactcaccgaggcgttcggttcggtggaggctttcaaggagcagttcaccaaggccgccgtggggctgttcggctccggatgggcgtggctggcaatggacaaggccgggaaactgtcgatcgtcgccaagccgaacgccggcaacccgatgaccgacggactgcgtccggtgatgaccgtggacgtttgggagcacgcctattacatcgactaccgcaaccgtcgtcccgattttctggcggcgttctgggagctgatcgactggcaaaaggtcgccgaccgctgcatcccgaagcggtacaagtgcacggcctgcgactacgtctacgacccggcgaagggcgatcccgagacgggcatcgagccggggacgcctttcgaggagattcccgacgactggacctgcccgatctgcggactctacaagaccgacttcgaggctgtcgaggagtaaacgaaaaacctccgcgtgcaaacgcggaggtttttttgtgcccgggtcgcgggaacggatcagaagacgaacttttctattttcagttcgcccagctgttccagacgcggcacgagggtcgtgaagtgcgacgcctgttcgtgggccgcgagggcctttgcattgctccaggtttcgcagatcatcagcacgtcgctgcgcgtggcgctttcgaacaggtcgtaggccacgcatccctcgtccttgagcgaagcggctgccagctccttggccgtgcgcaccagttcttcgcggttgctttccgtcgtgcggataaatacattgagacgtatcattgttttccagttttttggttttgtcgttttgcaaatataacgaatttttcggtgacggtgcgccgtcggcggaaacaaattgtcgacttccccggaaatcccgccggaagtcccgcttctgcggcgtcggggaggagtccgcgagggaaccgtccggcggctgcggggtgcgagttgccggaatttttcgtatcttgtgcctttaaccgcattaattatggaactgaacgacaagaaattcgcggtgctggtcgatgccgacaacatctcgcaccgcaagataaaggatattctggatgagatcgccaactacggcacgccgacgataaaacgcatttacggggatttcaccaatccgaaattcgccgcctggaaagaggtgctgcttgagaactccatcacgcccattcagcagtacgcctatacgacgggcaagaacgcgaccgattcggcgctgatcatcgacgcgatggacattctgcacaaggagggcgtggacggattctgcatcgtgtcgagcgacagcgactacacgcgcctggccagccgtatccgcgaatcgggccgggaggtgctggggttcggcgagaagaagacgccgaagccgttcatcaagtcctgcgacaaattcatctacgtcgaaatcctcgggcagacgccgccggagaaggcggcccctgcgaagaaaaaggcggacgcgaaaagatccgccggggccgaagcgcctgtgggtccggccgccgaaactgccggggaaaagaaaccgtcgccggatgcggggcacgcctcgacgatcatccgtccgttcgacgacgaattccgcacgctgctggagaacacgatcgacgatgccgccgacgacagcggttgggcttctctgggcgacgtgggcagcgtgctgtcgaagaaaatgccggatttcgacccccgcaactacggctacaagaaactttcgctcctggtccgggcgctttccgatgccgtcgacatgaagacggagcagcagcgggtttacgtccgcaaccgggtggggtagggctttccgtatttcgggagggatcagagcgggccgaggctcccgcgggcggcttcgtattcggcgacgagacggcggaggatctcgccggccggcggcaggtcttcgatgagcgcggcgatctgtccgatctccagttccccttcgtcgaggtcgccttcgaaaatcccccgtttcgggcgtccgcggccgatcagggccgacaattcttcggcgtcggcgccgcgcgattcggcctcctcgaccgtgcggcagaaaccgttgcggacgaggcgcgtcgggatcacctttttgagcgtcaggatcgtgccgccctcctgtacctctacgcaccgccgtttgaacgcctcgcaggccgaactctcccgcgacagcgcaaagcgcgtccctaactggcatccttctgcgcccagggcgaaagcggccagcatgccggcccccgtggcgatgcctcccgcggcgatgagcggcaggtcgacggcctgccgcacctgcgggacgagggccatcgtcgtcgtctcctcacggccgttgtgccccccggcctcgaatccctcggccaccacggcgtccacacccgcttcgcggctcttgagcgcgaatttcgaactcgacaccacgtgcgccacgcggcagcctgcgtcgtgcagacgtgcggtccaggtcgcggggttgcccgccgaggtgaagacggccgggacgcgctcttccgtgatgacgtccatcagctggggcgcataacggtaggccagcggcacgttgacgccgaacggccgggaggaggccgcacggcatttgcggatgtgctcgcgcagcagttcgggggtcatcgagccggagccgatcagccccagcccgccggcctcgctgacggcggcggccagccgccagccgctgcaccagaccatcccgcctgcgacgacggggtagcggatgccgaaaagggtcgtgattctgttttccatcgttttctggttttctgcgggattaagatacaattatttttccaaaacgggagcggatgttccggaaggtatgcgcaaaaaaaagcggcgcttcgacccgtcgggtcaaaacgccgttatgaaaaaaaagggtgagctacttacatcgcaccgctacgaccacatacccttgctcgattcctcgcctgggggattctgtaggagctggtcgtgtaagactcacccgggcacaaaagtaggaaaattttatatctttgcaaaaaaaaactgaaatgcgtaagaaaatattaggttggggtctgctggcggcgttcgtcctgacggccggcgcagggcttgtcctgcggcagcagttctatggaaatgcggtcgttacggagcgggacctctacgtgagcgcccgggccgaatacgggcaggtcgcggactcgctgctgccgcagatcaaacaccgccgggctttcgacgcctatgcccggaggatcaacctgtccgaaaccttcaagcccgggcattacgtgctcaaacacggcatgagcgtcatcgaaatcgcgcgcatgctcaagctggggttgcagacccccgtgcgggtgacgatcaacaacgtgcgcatcccggcccagctggcgcagaaactcgcacggcagatcgacgccgattccacggcgatcatgcaggcgctgacctcggaggagctggccgcggaggtcggattcgacagcgtgacgctcttttcgatgttcattcccgacagctacgagttctactggacggtgacgcccggggagttcgtcaggcgcatgaagcgcgagtacgaccgtttctggacttccgaacgcgatgtaaaacgcaagcgcagcggattgagccggctggaggtgatgacgctggcttcgatcgtctacgaggagacccgcaagagcgacgagatgccccgcgtggccggggtctacgtcaaccgcctgaagaagggcatcaagttgcaggccgacccgacggtgaagtacgccatgcaggatttcggcctgcgccgcatcctctaccgccatctgaaatacgattctccctataatacgtatgtgaacgaggggctgccgccctcgccgatctgcatgcccggaaagaacgccatcgacgccgtgctgaactacgaaaagcacgactatatcttcttctgcgcacggcccgaattcgacggttaccacaacttcgccaaaacccttcgcgagcacaataagaacgcccgggcgtacagcgacgaactcaatcggcgtaagattaaataattttcgtatctttgtcatcccatgcttgcgaagatatacgaacagaacccctcggagaaggagttgcagcgcgtcgtagacgccctggagcgggatgaaatcatcatttatcccaccgacagcgtctatgccttcggctgttcgctgcgctcgccgaaggccatcgagcggctgcgccgcatccggggcaagagcgaggagaagttcaccgtggtcttcgaaaacatcgcccaggtcgcggagtactgccgggtggacaatgccgttttccggattctgaagcgcaatctgcccgggccgttcaccttcgtgctggcggcttcggcgcgcattccggacaaggcgctcgaacggcgccgcacgatcggcgtccgcattccggccagccccgtcgcgcgggccgtggtcggggcgctggggtgtccgatgatcaccacgtcggtcaaggacgatgaccaggtggtggagtatacgaccgatcccgaactgatccacgagcgttacggccgcgaggtcgcgctggtcatcgacggaggcatcggcgacaacgtccccacgacggtcgtggacctgacgggcgacgggccggagatactgcgcgaaggcaagggtgaactgcaatgaagaggggcttgatgccgccgcgcggcaaggctggcgcctcggagtgttaaaaacaaaatagaaaaatggagaagaagaatttctggaacgatgccgcgaaatacggcgtgatcatggctctggtcgcgatccttttcgacgtgctgggcttttacgtgcagaacacgctgctgtccctgctgtcgctcgtcattttcgtcctgctgctggggtatctcaccaaacgccgcgcggaacgcttcggagccaggggatacggctacgggcagtgcctgggtttcatggtcagcgtgatgctctgcgccgggtttatcgagggagccttcatgggcgtcgcctccaactggctctttgcggccagatacgaggcgatgatcggtccgtcgatcgccatgctggagaacaccgggttctacacgggcgaccagatcgagatgatgatgaaactgatgcgttcgccgctggtgcagctcttcagcggaatgctcgcctcggctatcaagggcggctttttcggtctgtttattgctgccttcaccaagcgtgatcccgacgttttctcggaaggcactaaccaataaggatggataaactgaatatatcggtcgtcgtgccgctctacaacgaggcggagtccctgcccgaactggcggcatggatcgaccgcgtgatgcgcgaaaacgggttttcgtacgagcttattctggtcgacgacggttcgtcggacggctcgtgggaggaggtcgaacggctcaagaggcagtatccggccatccggggcatcggtttcgcgcgcaactacggcaagtccgcggccctctactgcggattcgcggctgcggaaggcgaggtcgtcattacgatggacgccgacttgcaggattcgcccgacgaaatccccgaactgcgccgcatgatcctcgaagagggctacgacctggtctcggggtggaaaaagaaacgccacgacccgatcggcaaacgctggcccagcaaattcttcaactggacggcccgggccgcgtcgggcatccggctccacgatttcaactgcgggctgaaagcctaccgccgcaaggtggtgaaggccatcgaggtctacggcgagatgcaccgcttcattccgttcctggccaagcaggccgggttcggccgcatcggcgagaaggtcgtcgaccatcgcgcccgcaagtacggcagttcgaaattcggcctcgaacgcacggtgaaagggtatctggacctgatcacggtgctgtttatgacgcatttcgggcgttcgccgatgtacttcttcggcagcctcggaacgctgatgttcctcatgggcggcggcacgacggtgtggatcatcgccgagaagctctggaagcagagccacgccctgcccctgcgggcggttacggaccagccgctgttttatctggcgattttggccgtaattctcggcgttcagctgtttttggccggatttttgggcgagctgatcaacagagggtcttccgagcggaacaaatacctgatcgacaaaactttgtaaatgatgatacaacgaatccaaacgctttatttgctgatcattgcggcgcttatggccgtgacgctcttttcggggctggcgtggtttgctggtgacgccggcgagttcgggctttacgccttcgggttgaaaaccgccgaaggggagcttgtccagtccaccgtctatatgggcgtcctgctggcgctggcctgtgcgctgccgctggtgacggttttcctgttccgtcgccgtttgctgcaaatacgcctctgtgtggtggaaatggtgttgctgttaggctcgctggtgatggaaggcgtctattactttttgagctggcgggtcttctccgacctgacgttccatacgcagggcttcaagcccgccattgtgctgcctctggtctgcctgctgtttgcctatttggcggcccgtgcgattttccgcgacgaactgctggtgcgcgcagccgacagaatacgctgatcgagcggatactgctgacccggagtatgcccgagcgcatgttccgggtcttctgtccccgtcggcgaactgctgttcagacggaaaagggttgcaattcggaccgatctgattattaaaagaatgttacaaacctttgcaggtccggaaaataattttaactttgaggcataatattgtcattatgtaatgaatttaaagaattttggctacaaacaatacattttttaactaacactcaactctatgaaagtagtaaatttttggaagacattgttctgtgcagcgctggccgtgacggcttttagcgcatgttcggacgatgacgaagagggcggttattcgggcatgcccgaaattaccgtgaacggcggcgagtcggtgactgtcgccgggaaactcgagggcggcaagctcgaacagacggtcgaggtcgtttcgaaaggcgactggaccctgacattcaagaactccggggattcgcagtgggttactcccagcgcgatgtcgggcaagaccggtacgacgcagcttaccttcacgctgggtcaggcttcggcagagcgcagcgcaatccttgttctgaccgccagctccatggtcgagggcttcccgcttacggacgaggctacgatcacggtcgtacagagcgacagcgatgttccgacgggtaacgctctttacagcgagaactgcggcacgaaggtcgagaaagtcgatggctactggccttatgtggacaagttcgaaggttggacccgcggcggttcgctcgatcagaaggccgttacttataccggcaacagcgcttcggtagccaacagcggcaaggttttcgatcctgccgaggatgaaacgacggtagttacgggtcctccctatgtttcgatgaacaaatcgacttcggttttcaacatcaatgacatcaatatcgcatcgaacaccaatttcaccttcacgtttactgccgctcaacagattaactattccaatggcgtagtgctgggcgacatgacggatgaaacgattcggttctcggtgtctaccgatggttcgagctatgctcccgttgctctgaaagtcaaaaaagtcgcttccggctactggtatctctgcaccgccgaattcaaactgcccgccggtgtttcgaccgataagatctgggttcgtttcgacggctatgcaggacttgaaaaccacggtctgcgtatcgacgacttcaaactttatgaaggcggcaacggttcggaactcgtcgttccttcggtggattatacgaagggtacggttgccgaggctatcgcagccggagccggcaagaactacgaggtcgccgctacggtcgtagccatgcacacgcagggtatcctgatcggcgatgcgtcgggtgtcatgctggcgttccttggcgagactcctgcggtagctgttaacgatgccgttaccgttaagggaacgaccgaattgcggaatggcgtcattcagttcggcaaggagggtctttcggtcgccaagaccggtacgagcagctataacacgcctgctcccgaggtaatggacggcacggctgtcacggcctatatcgcaacggccttggaaaataaggctgtgtacaagtatgtgaaatacaacggtgagtttactgtcagcggcaactattacaatgtcgttatcgccggtacgaccacgaaaggctctgttgcctatggcaaatcggagtgggcgtcgtttaaggacaaaccggtgactgtcgaaggctggctgctgggcggtacggccaactatctccagacgatggctacgtcggtgacggtcgattcttcgacgccgattgttgaaatctccgctccccagcagttcgctgcaacctctcccgtggctcaaacgctcaactatacggttaccaacacgacggcttcggctgtaacgttcgcaatcgagggtacgaatgccgacaagttctcgctcggcgccaagactgataacaccatcgtcgtaagcgcgaaaggcgacaacacggataagacagcctatacggccaatctggttgccaaagttgccggtgcgacggttgcaacggttgctctgaagcaggctgcgcctgcgagcggtgatgagggacctgcttatctttggactttggcgtcgggtgatatgactactgctggcggaactgtaaccaaaggtgagcctgcaatggagtggacttcatctgctgtaggttatattggctgggatcagaataatggaaagggtgttcagtttggatccagtaaaaatcctgtaaatgggacttatacgctttcaacaacagcttattccggaaaaatagctaaaattgtcattaacgcctctgttgccagtggtggtgatggtaaattgacggtaaaagtcggtggtactcaaattggtgaaataactacgctggtattgaacgctacggattatacgtttactccatcttcgccggtttcgggtaatattacgattgagctaacaaatacagtcaaggcaatgtatttgaagtctattgcaattaatcctgccgaataattctaacagtcgaggaaaccgacttgtaaaaccaaccactcttggcggggataactccccgtcaagagtttggtttctaaatgggtctgcggaccaaatgttatactttattctgaatgatgttgaaaattaaacagataggcatgctgctcgtgacgatgtcggcgatgcttgtcctgtttgcgggatgcggcgacaaggacgacgggggcgacaaggagtccctcgcgacgctcgttgcagagaccgtgagcagttcaaccacaacgaacaagatttcgacccaaggcccgtcgggcatcaccttcgaggcgacgatcgtctcgcagggcggggatgcggagtggtgttcgttcgatttgaataagcaggtatcctccgccggcggaaacgtcggggacccggcctacctctatttggacaaaaacaattccgacgacgaccgcacggcgcggatcgacgtaacctataccaacggttattccacctccctgacgctgacgcagagggccgcgggcttcatcgactacgaccgttcgtggggcgagcagcccgaatatcgttccgacgacgcttatatctataagacctattatgcgacgtttgtgagcaatcagttctttccgggcggaaaactgcgcaactattcggtatgctacgatgtcgatcggcatatttcgcattgggtggcttatccgatcttcaagaaggtctacgaaacgcccgttttgagccgggtcaacgatttcaattacgatcccaatgaccagctgcccgtgattcccacccgcgaccagcaatacatcgggacaggcggcaacggccgcggttacggtgcaaaggggtacgaccgcgggcacatgcttccgcaggcttcgcgttacaacaattacgagccgaaccggatgacttactacggcaccaacatgatgccccagaacagcacgctgaatcagaatatctgggcctcgctggagggcaaagtccgtggctggggcggcttgcagacctacgatacgctctatgtggtgacgggagccgctttcaagagcacgaagaccatcgacaatgccaacggaccgatcgccgtgccgtcgcattgctggaaagtgctgctgcgtcagcggggcaaccagaaccggcagatctctcaattcaaggcggatgaactgaaagccatcggcttcgtgttcaccaacgatgacgccggagccgccacgtcgatcgaatccgctgtccgttcggtgaaggagatcgaggagctgacgggcttcaagttcttccgcaacctcgacccggccgtggccgatgcggtgaaaagccagaagaacctcgccgactggtagggattatgatacaatgaattgaaccttaacaacaaaaatcgtttatgaagagaatctttttgacaggactgtttgcctcgctgatcgcggtggcatgcttcgcgcagaagccctacaaagtggtcttctacaacttcgagaacctgttcgacaccattcacgatcccggcgtcctcgatgaggagttcacgcccgaaggacccaagaagtggaactcggccaagtacaccaggaaaatcgggaacctcgaacgggtgttgttcgacatcgccgccgaggataaggattatcccgtggtgatcggcgtttcggagatcgagaaccgctcggtgatggaggatgtgatcgcgcagccgaaactcgcgcccggcaactaccgcatcgtgcattacgattcgcccgacgcacgcggcgtcgacgtggcgttctactaccgtcccgacgttttcaagctggagggaagcgccgccattccgttcaagatgccggaactgcccaacttcaggacgcgtgatttcgtcacgatgtggggcacgatcgacagcgagccgttcttcttcctcgtgagccactggccttcgcgtctgggcggcaaggaggcttcggcccccaagcgtctggctgccgccaagcaggtgaagcacatcgtcgactcggtgaccgccgccaacccggccacgaaggtggtcgtcatgggcgacctgaacgacgatgccacggatgacagcatcgtcgagggcctcaacgccaagggcaagatcaaggaggtcggcaagggcgacatgttcaaccccttcatcggcctgctgaaagcgggttacggcacgctggcttaccacgacgagtggaacctgttcgacaacatcatcgtttcggagaacctcgccaccggttccacgggcagcctgaaaatccagcccgccggcaactcgaagttctacggcggcatcttccgccgtccctacatgatccagaaggagggccagtacaagggctatccgctgcgtacgttcgtgggcaacgatttccagggcggtttcagcgaccacttccccgtatatatctacatcgccaaataaacactctaaaatatttgtatgaaactcaaagttctacttattctgatgctcgccgccgtgaccttcacgtcctatgcgcaggacggaggcatccgcggtaaggtggtttcgcgcaacggtcgcgtggccttgagcaatgtacaggtgaagatcgaatcgctgggtctgacggccatgaccgacaaggacggcaacttcatcttcgagaatcttcctgcgggcagctacacggtgctcttctctacgcccgacttcgaggacctcaacctgatggtccgcgtgggcaatgagcatgtgcaggacctcaagtcggtgatcatcgtgccgtcggggcagagtgcggttctggacgacgccgttttcgccgaattcgacagcgactcctcgtcgtcggacacgcaggcgctgccttcgtcgctctcgtcgtcgaaggacctgttcaacaacatcgcttcgtaccgtttcagcgagatgcgtttcaacgtccgcggctacgattcgcagtactcggacatctacctgaacggcatccgcttcaacgacgccatgacgggctacggtccctggtcgctgtggagcggactgaacgacgcgacgcgtaaccaggagaactacacgggcctcgaagcgtcggatttcggcatcggcggcatcggcggcatgaccaacgtcaacgcccgcgcctcgcagatgcgcaagggattccgcgtgagcgtgtcgaacggcaaccagatgtaccgtttccgtgcgatgatctcctacggctcgggacagttggacaacggctggtcgtatgctttctcggtgggaacccgccagggcggcaacggctatgtggacggcgtttactacaactcctattcctatttcgcttcggccgagaagcttttcggacagaaccaccgccttgcgttgacgctgctggcttcgccttcggagcgcggcgcgcagcaggcttcgaccgacgaggcttacgccctgttcggcaacaactactacaaccccaatgtgggttaccaggccggcaagctccgcaactcgcgcgtgcgcaacacccacgagccgatcgtgatgttgaactatacgtgggacatgtcggagaacacgcgtctgaacgccgccacgtcgctgcgtttcggcaggaacggctattcggccctgacgtggaacgccggagcggacccccgcggcgactactaccgctatatgccgaattcggataagacgcagatcgtgccgggcataaccaccgacgagacgatctatttttacgcgatggatggcgccatagcgaaaggcgtgtgggacggtatgctcgactacgacaaattcttccagacgaatatgcggaatatcgacaccgatccggtgctgtccaaactgatgggtaataacagtcgttcgaactacatgatcgaggagcgtcacaccgaccagctggactacaacctggcggtcaacgtgcagcataacatgcgccacaacatgcgcatcgtcggcggcgccaacctgcgcgtcaaccgcacgaattactactcggagatcaaggacctgctgggcggcgactattggtatgacatcgacaagttcgccgagcgcgacatggccagcgccgaggcttaccagaacgacctggattactactgggctacggggcacgcccgcattgcccgtgtcggcgacaagtacggttactactaccgggcgcacctgctcgaaaccaatgcctgggccaactacacgtggggcatcggcggtttctcgctgggcgtttccggatcggtcggctactcgaacatgtaccgcgagggcatgtggcgcaagggtctgttccccaacgattcgaaaggcgattcgaagaaactcgactacctgacctacgatgcgaaactttcgctgggctacaagttctcgggagcgcattcgatcgaggccaatgtggcttacatgcagcaggcgcccaagttcgcgacggcattcgtgtcgccccgtacgcgcaacacgaccacgccggggctgaaggccgagaagattttcgcagccgatcttacctacaacctcaatctgccctacatcaaggcgcgtctttcgggatactatacgacgatcgaggaccagtcgaaggtcatctcgttctacgacgatacccgcagttcgttcaccaacttcgccatgagcggcatcgacaaacgctactacggcgttgagttgggcctttcggttcccgtatggaacggcctctcggtcgtgggtgccttgagctggggcgactatacctatacgtcgaatcccaacttcgtgcagacggttgacaacgtggacaagatcgtactgaaagataaggtcaactgggacggttatcgtgtggaaagctcgccgcagctggctttcaacatcggtctcgactaccgcggaccgcgcaactggttcgccggtgtgaacttcaactactacgacaacatctatctttcgatgaacccgatgtaccgtacggctaccgccattaagtattatacgaatgtgctgacttccaatacggccaccaatgcgcagaaggcatcggccctctcgtcgatcaagaccctccgcaagcaggagaagtttgacagcgcatatacgttgagcgccaatatcggcaagaactggtatatccaccgggtctacatgctgggcttcagcctcgaggtgaagaacatcctcaacgaccaggacatccgcacgggcggttacgagcagatgcgtatgagcaaggtccgcggcgagggcggcgagcagatttacggccgcttcccctcgaagtatttctacctgttcggtacgacctattacctgaatgtctatttccgtttctaatcgcgcaaagcataatttatgaaaagtcttaaaatagcattggcggctctcgtcggtctggtggccgtgagctgctacaacgatttcgacactccggctccgcagaagctctatacggtcgacgatatggccgcaatggggcttactccgatctccatcaaggaggtgaaggagaagttcggcccgatctccaatacgggaaccaacgacaatttctccacgaccaagaccctcaagttcggaacccgcacgtccgaggaggccaagttcgacggcttcatggagtggcccgaggcttcgaaatactacatcaagggcaaggtgatcagcagcgaccgtcagggcaacatctacaagtcgctctatatctacgacggcacggccggtatcgagctgaagctctacaacggcctttatctcgacttcctgctcgacctggcttcgaagccgatcaagagccagtgggtctacgtgcgtctcgacggtctctatctgggtaactaccgcatgatgctttcgatcggaggcgctccctcggacggcatcaacacggccggcaaccacaagttctacgccaactcgaacctcgacaacccgaaggtcgccgccctgaacgtcttccgcggcgaatacacgacgctcgacgactcggacatcaaggaggtcgacggttcgaactacacgtcgctcggcgaggccgatctgggccggctggtgcgtttcaacaagatcaagatccgctatgcgggtgtgaagaatcaggacggcgtgacgcctccgaacctcaaaaacggcggaaatgcgaatccctatccgagctggatcgtgaccgactggggaacgcccatcttcggcgcatggtatcgctgggcctacaacaacagcgagcagaatatccgtctctacggttcggtgctgatgagctacaacgatgcggcggagtacacttcggacccgggcgtttacggcatccgtacgagcggttacagccagttcgccatgaagcccatcccgaaggacggcacggagggtacggtgctgggcatctacggcatctatgcgaagaagagcgatttcacgggaggttcggaggactgggcgcagtaccagatctcggtgagccgtatcgaggacctcggtttcccgcccgagtcgctgctttccgaggagtggatcagggccaatacgcccgcctcgtcgctgacgcctcccgtgaagaacggcggcgacgattacgagggtgactgatcccgcgtttgagcaataaaaaactgcgacccttttgggtcgcagtttttttgtgccgcggcggcagcgttaccgcttgttccatttgcaggaggtctggtagtagccgatcgcgcggtcgacctgcacggcgtccttccgctccatcgcttcgaggtggtggggattctcctcggtgggaaccacgcggtactgctcgaagcggcgcacgggcgacagaatcgtgaaggtgtcgccttcgaggtagccgaggtcctgataggtggcgatgaacgcgcggttgacatatgccgggtcgaagatgctgcggccgtagaaatgcgagtcgtagctcatgttgagcagcgacagcagggtgggcatcaggtcgatctgcgagacgatgccgtcgaccactccgggttcgataagcccgggggcgaggatcagcgccgggatgtggtatttctgcaacggaatctcggtgcggccggcgctcgaagcgcagtgatcggccgtgacgaggaagatcgtgttttcgaaccacggctgcctggccgcttcggcgaagaaccgtcccagcgaatagtcgctgtaaagcacgcctccggcgcggctcttcgagtcgttgggaatgcggattcgtccggcggggtaggtgaaggggcggtggttgctgacggtcatcacgtgggcgaagaacggcttgccgctgcgggtctcctcgttgagcgtgcggatgaccttccggtaggcgtcttcgtcgcagacgccccagatgttggcgaaggtgatctcttcgggcttgtagcttttctggtcgacgatgtcgtatccgttgcccgagaagaaggtctccatgttgtcgaaatagctgttgccgccgtagaaataggtcacgttgtatcccttgtcgcgcagcaaggctcctgtggagtgcattccggcgttgttcggacgcttgatgatgctttggcccgggcagggcggcagcgagagcgtcacggcctccaggccgcgcaccgtgcggttgcccgtggcgtatacgcggtcgaacgccagtcccagtttgtagagcgagtcgagtgcgggcgtgatccgttccgtgttgccgaaccgctccatgtacgaggcgctcatgctctccatggtgatcagcacgatgttgcggcggatctcctccccttcggcgcgcacggcgtgcaggttgtcgcccgtgctttggtagaccccgtgcacgaaggcttcggcctcggcttcgggacgcgtgaggtagaactgttcgtagtcgagcgtgttcttgacgaaggcgtcgtagaacttgtagagtccgttggcctgcaattcgttgacgtagacgttgtcgctgtcctggaagcgggtgttgaagttcagcagcccgatcgcggcgaacagcgccgcgacgtaggccggtccgattacggctttccacctccagcctttcaggcattcggtctgcacgagttcgctgcggaagaagtaccacgtcacgagcagcgtcacgacgacgatgcccagcgtcatcggaacgacggggtaggactccatgatgttgcccaccacctcgttggtgtagaccaggtaatcgacggcgatgaagttgtagcggacgccgaattcgctccagaagaaatattcgctgatgccgttggagatgatggcgcccacgtagacgacgatgaagagggcgaaccacaccgtggtccagtggctgcggaatccgggcaggaaaagccgcagtgcgaagctgccggcccagtagcccagcacatagagggcgattcgcggcgcgacgcttccgtattcgtcgaagatcgtgttgaagaacgccacgtagcagaacgccgccacgagcagggcgaggaggatgtagccccacggctttttgtacttggtgcgcgaaacgctcaacatgaagagccagaggaaaatgaatcccgccgtcgcggcgcagaaatcgttcacggcgcccagcaggaagacttcgcaccattcgccgaatgagaaggcgagtgaggtggtctgctcgttgaaaagcagtacgacgcgcagcacgaggccgacggcgacggtcagcagcgacagtttgagatagaggtcggagaccagccgaatacttttttgcatgatgaatttggtaattaacggtacaaagttaaccattttcagcccgttcggaaaaagaaaaggcagtcaactgggtgactgccttgttctgtcggtttgaaaaattgatcgttttgtcgcttacttcgacgggcgcatgacgaccttcacgaggtttccgtccgcaaggatcttcttggcgagcgcctgcacgtcggcattggtcaggtcgcggatcgcctgttcgtggtcggcgatgtagttcaggcccgagccgtatttgatctggatgtagctcatccatgcgccgttctgttcgaggctgttcttccagctcttgagcatgaattcgcggtttttctcgatgtcctcgctcttgggaccgttggctgcgatctcctcgatctccttcatcacgatctcgcgcagttcgtcggccatctcctcgttggtgtcgaacgaaatggtcatgctgtaagtctcgcgggggatgtacttcgtcgaaccctggacgcgcacgccgtaggttccgcccttctcctcgcggatcgaaacgagatagcgcgaattgagcgcctgcgtcaggaacgtcagggccattttgttcttgagcgtgtagggcatctcacccgagaaatggtagttgaccgagaccttcggctgctgcatcggagccgtgaactcctccgtaacctcgcctttcaccggataggccttgtcgtcgacgtaattgatcggtttgcgggcggcggggatcgaaccgatgtatttctccacgaggggtttcagcgtttcggggtcgatgttgcccacgaacgtgaagacgaagccgttggctccggggtagagcttggcgtaaatgccgggcagctgttcgaagtcgaacttattgacgatctccgtcgagatcatctgacggcggggattgtggccgtaggtcacgtcggccaccttctcctgcatcaggaagtcgggattcgacttggcattggcgagctgggcgaggagcatcttcgtgagattgtccacgtcgtccttgttgaaccggggctgcgtgaaattgaggtagagcagctggagcatcgtctcgatgtccttgggcgagcagacgccgcccatggcgctggtgtagttctccaccgagggctgcaccgaggccgttttgcccgaaagctgtttcttgagttccgtggccgagaatttgccgacgcccgacatcgagttcacggcgggcatcatttcgcccatgtagtactcctcgtccgagagcagcgacaggccgcccttgccgactacgcccaggcgcacttcgtcggccttgaaggtcgtgggtttcacgacgaccttcgcaccgttggccagcgtccattccgtcgttccgagctgtttgtcctcgaccgtcttcttcacgggcgagcctttgagcacggtcccttctgcgatcagcggctccttgaccacgttgtcctcataggccgtgacctccgatgcggccaccttgtcgcggatggcgagaatctcctcggcggtgggcgttgcgacgccctccttctcgggagcgttgatcacgatcacctgattcgtcgggagaatggtctgcttcgcgaaggcgttgacggcatccacgttgagcatcttgatcagcatgctgtcgagctgccattcggtctcggcatcgggcatcggctggtttttctggtagttgttcagataggtctgcacgaattcgttgttgcggcggtcgttgcggttggcgtacgagcgttcggcctgacgcatcaggttctcctgggcgcgttcgaactcgccctgcgtgaatccgtagcggcgcaccttctccatttcggtatagagggtctcgaagccgcgggccagcttgccgtcctcggtcatggccacgaataccgtggcgtcgagcgtcgggatgatgccgatcacgtcgcccgtgcccatgccggcgccgaggaacggcgcgtcgggctgcatggcgatctcctgcaggcgggcgttctccatcgtggacatgtaggcttcgatcacgttgttggcctcggccagcaccgtgttggcgagctgttcgggaagcgccgggcgcttgatgaagagctgcaccttcgtaccctgcatttcgggatcggtgtagatgctgacgatcggctcctcgttgtcgggaaccacgatggtctccttctgcgatgcgccggcggcgggagccggaatgtcggccatcagcgtcttgatcttcgattcgatggtatccacgtcgatgtcgccgaccacgattacggcctggtagtccggacggtaccattgtttgtagaaatcctccagctccttgtgccggaagttcttcagtccgtcgaggtagccgatcaggttgcggcgctcgtatttcgtgcctttgcccagcgcctgcaacagcttcatcgtcgaacgccacgacgcgccgtcgcgcgtgcgcagctcctccatgatcacgccgcgctccgagtcgatttccgacggctccagcgcgatgaagtgcgaccagtcgtgcaggatcagcagcgccgagtcgatgattccttcgcgcgaggtcggcacgtccttcatgttgtagcacgtgtaatcccagctcgtgccggcattgaggttggcgccgaatttcacgcccacggtctccagatactccgtgagctgtttgcccgggaggttcttggttccgttgaaggccatgtgttccaggaagtgggcgaggccctgctgcgaatcgttctcctggatggctcccacgtcgtggaggatgtagaaatcagcctggcctttcggcttttcgttgtggcggatgtagtaggtcattccgttttccagtttcccggtgcggacctccggatcgaccgggatcggctggttcatctgtgctgcggcgctgccggcggcgaacgccgcgacggccagcatcaatagttttttcatgggcatttggtataaggtttattgtttctgtgtctcttcggggcggtattcgatgatatcgcccggctggcagtccagctcgcggcagatcgcttcgagcgtggaaaaccggatggccttggccttcccgttcttgaggatcgagaggttggcgggcgtgatgtcgacccgttcggccagttcgccgagcgacatcttgcgtttggccatcattacgtctatgtttatgattatcgccataaagtcgtcctcccccccccttttatcgtttgcatttctctcatgtcgtctgttttagatggtcagtttctgctcctcgctcaaattctggccgatggcgaagacctcggcggcgaaaaggatcagaatacccatgatgatcattgcgtaggagacgtggaaacccgcgtcgacggtgtatccgcttccggcgagcagttcggcggcgcggctgttcatcacccagtccacggtgtcgctgatcagttcggtgacgatcgtcagcatgccgattgcgcgcagataccagacgttgcgtttgtcgagcgtgcgctcttcgcggatcgagcggcgcagcgagtggatgatcacgaacatcagtacgatgatggccaggtagagaagcgggcagagcatgaccagcgcatagagccatgcgctgccgccgatcgaacggaatgccagccccagcggggatgtgcccggggcgttctgctcgacgaccagggcgagtttgcggacgttggctttgatttccacgcccggcgctgcggcgatttcgacggccgtttcgggctgtcccgtcacccggatgtcgcccagcatgtagatcatgcgcggcacgccggatttccacttttcggcgatgtcgttaccgagttccgcgccttccgccgcgccccgcgagaaattgggcaggattccgtgggcgatgcttgccacgagtacgatgaaaaacgtaatgtaaatgaccagcaggcgttgcaggagcgattttttgttctgcatgtgtgactattttggttttacagttgcaaagatagaattaattttcgaaaaacaaataatatttatcgtttttcgataaaatttttcgcggcggacaaaaaaggacggccgcctgtgccgtccttcggatcgtctccggagcgtttactccacgttgtctttcagctgtttccagaatgaagcgctgatggacatcgagatcgagatggccagcacgtagaggatgaacatgacgacgaacgtgatgaagccgatgccgatcgcgttgcagatggcctggaaaatgccgaatacgatgccgaacagcacgccgacgaccagcgacacgaagaacatggtccatttgctgccgtaggtggcgtcgttcgaagccttgatggcctgtatcggatttttgcccttttcgatgaggaaatagtaggagagcgtccatgcgatcgagagcacgatgcccgggatgaccatgaagagcacgccgatgaaaatcgggaaaaccatcaggcccatcgtgatgaagaactcgcccatgtagcggcggtatttgctgtcgaaaatgcccaggggattgacaatctcacccttggccaactgtgtgggcagtaaggtgatggcgattgtggtacccacattgagataaggtatccagatcgtaatgagccataaggccactgctgcgatcaccgaaggtgcgttctttacgccgatggcgacggaatccttgagggtttctccgaaatcgagttttttcacttccataactaacaggtttaagggttaacatcaaaaacaaaaatacgaaaaaaatcgtatctttgcctgcataaccgtaaaattcaatgcaatggctgaaaaatctcgctataattaccgggttgaaccgcaggacgtggatttcacgctgcgggcgacaatcccttcgctgggcggctcgatactcaacaccgcgggcatcgacgcccacggcaaggggttcggagtcgatgcgctgaatgccgacaaccattcgtgggtgctttcgcgcatggccgtcgaattcgactgccagcccacgcagtacaccgactataccgtggccacgtggatcagcgattacggccgggtgctctcgacgcgaaacttcacgctgaccgatgccgcaggccgcgaattcggccgcgccgtgacgcagtgggcgatgatcgacctgcagagccgttcggcgatcgacctctcgtgggtgggcgatgcgcatgccgacgccatcgtcgatgccgcgcccccgacggacaagccgcgcaagatccgtgcggtaagccctaccgcgacggccgaacaccgcgtggtttacagtgacatcgacttcaaccgccacgtcaacacgatgcgctatatcgaaatgatgctcgacatgctgcccgtcgacatgctgacgcaggaggctccggtgcggctggacattcatttcctgaaagagtgccgtttcgggcagacgctgacggtggggtgcgagttgcgcgggcgttcggcgctgttcgaaatttcggccgacggcgctgcggctgccgtgcgtgcctctatcgaatggaaataggcctgcggggaacgcttcgcagggcgtttgtggaacgggttttgcagttacggctgcaaaaccttttttcattatggagagcgcaaccaaaacacaagcgaaaaacaagtatcaggtaagcatcgacctgctgaacgatgccgtgggcaaggagatcgccacttcgttgcagtacatgtatttccacactcatttcgaggacgaccgctaccagtatctctcgaagatcatgcgcgagatttcgatcgccgagatgcgccacatcgaggagttctccgaccgcatcctgttcctgcagggcgacgtggacatgaacgcctcgttccgcacccggcaggtcaccgacgtgaaggagatgctgcgcatggccatgcagctggagcagagtacgatcgacagctacaacgaagcctcgcgcatcgcctcggagaacaaggacgccgtaacgcacaagatgtttcaggacatcatcgtcgaggaggagcagcatctcgacaccttccgcaccgagttgcagaacctgatcgactacggcgaggagtacctcgcgctgcaatcggccgccggcagcaagcatacgtcgaagagtttcaaccattccggcggcggcgaatagcggttcgcgcggcggaaagcacttctgacgcaaaaaacggaatccttttgccggggtcccgttttttcggttatctttgtacctgaatcattcgcgggcacctgtgcaaaccccggccggcgcatgagttcctcccgggggagggattcggggcggggcgggtctgccgatgcggccggaggccgcaggcgtcgggttgccggatcggatgaacggcatgaaatcgccggaatgctctgatacgatgaaaataacgattttaggacctgcccatccctaccgcggggggctggcctcgatcatggagatcatggcccgcacgttccagcggcggggcgacgaggtcgacatcaagaccttcacgctgcaatatccctcgctgctgtttcccggcgagagccagacggttgcgacgcctccgcctgcggacctccgcatctgccgctgcgtcaatacgatgaatccgctgaactgggtgcgcgtcggccgccggatacgctgcgagcgtcccgatttcgtgctgatgaagtactggacgcccttcatggccccctgtttcgggaccattgcccgcatcgcccgcggcaacggccatacgaaggtgctgtgccagatcgacaacgtcgagccgcacgaacgtcacctgaccgacaaacccttcaaccgctactacctgcattcggtggacggcttcgtctacatgtccgagcaggtgcacagcgagcttcgcgcgtacagcgacgctccggccctgttttcgccgcacccgctgttcgagaacttcggcgagcgggtcgaacgctccgaggcgtgcgtgcgtctggggctggaccctgcgaaccgctacgtgcttttcttcgggctgatccgcgattacaaggggcttgacctgctgctcgacgcctgggcgcagctccggcgcgcgggccgcaccgagggccgccggctgatcgtggcgggggagttctacaccgcccgggagccgtatctgaaccggatcgccgacaacggattgcaggacgaggtgctgctccacgaccgtttcatccccgacgacgacgtgaaatattatttctcggcggcggacttcgtcgtccagccctacaagaccgccacgcagagcggcgtgacgcagatcgcctatcagttctgcgtgccgatggtcgtgacggcggtcggcggactgcccgagatcgtgcccgacgggcgcgtgggctacgtctgtcctccgacggccgagggggttgccgcggcgatggaccgcatgtacgagggcgatgcgctgaaacgtttccgggagaactgcgtcggggagcgccggcgtttctcgtgggaggagatgtgcagccgcgtcacggaactctacggcctggtggctccgaaataaggcggcgaaaacctgaaaaacaaggcccggcagtgcgtcgcacaaccgggcctttcttcatttattcgggtgtagcttgggctacttcttgatattgggcagttccagcccgtatttctttttgcggtcttccgccttgagccacagtcccagcagcatcgccagcacgccgcacgcgacgaaaatcagcatcggacgggtgtagtcgtagggcattccctcggtccgcccggcgttgaaatatttgagtgcgaagccgaagagcatcgggaaaaggcacagtccgatgttctgaatccagaatatcagcgaataggcggaacccagatagcgcgtctccacgatcttgggaaccgagggccagagtgcggccggaaccagcgagaacgagatgccgagcaggacgatcgagccgtaggcgacgggcttgctcgggaactccgggagcacgaaggcgaaggtcaggtggcagacgatcatcagaatggcgcctaaaatgagcatcgtggcgcccttgcccttgtggtcgaggtatcggcccaggaagggggtgatggccgccgcgcccatcgggaaccagcggaaaatgtcggctgcggtctgggccgatacgccgaggttgctctccagcatgttggtggcgaaacgctggaaggggaagatggccgaatagtagagcacgcagaggaacgcgatgatccagaacaccttgctgctcaagatgtacttcaggtcgctgaccttgaactcctcctcgctgccgcctccgccccggctgtcgagacccagttgtttgtccagtttgcggtccatgaaggagaagatcacgaacgtcagcagaccgatcagcagcagcacggtgcagaatgccaccggtcgtacgaccgttgcgggagccatgtcggcgagccacggtgaaatggagaagatggcgaaaacgccgacgcgggcaatggccatctcaagtcccatggccagagccatctccttgccttcgaaccacttggctatggcttttgatacggtgatgccggccatctccatgccgcagccgaagatcataaagcccagcgacgccagtttggccgaggcggggaacgaggtccaccacgagccgagccacgtttcgatgcccgaacccgcgaacgagtcgctcacggcgtagtattttagacaggcgccgatgaacatcagcgaagccgacagttggccggtgaaccgcacgcccatcttgtcgaggatgatgcctgcgaggatcagaaatccgaagacgttgagtatgaactccgaactgccgtacatgccgaatacgtcgggggtccatccgcgctgtgcctcgatcatgctttgcagcggcgacatcaggtcgacgaacatgtaaccgaaaaacatcgtggacgcgatgagcaacaacgccgtccatcgggctgcgggcgagtcgttgagtttacgttggatagtttctgccatatttttttgtgttgagttagttatccagtgatgcgtagcgtttcagcacctcgtaggcttcggtgattcccagttcgccggctttcgagaggtcgaggcagcccttgcgggtgtctttcataaacagctggatgatgccgcggttgtagtaggcctcggcgaatgcggggttgagtgagatggctttggtgtagtcctcgaacgcctcgggcaggctgcccgagagggccagcaggttggcgcggttgtagtaggcgtaggcgaagtcggggaagagcttcacggccttgttcaggtcggccaccgcctcgtcgtagctgtacgtgcgtttcgaattgttgttcagtcggttggcggggtccgagtcgatcgtgatccgctggtaggagttgtcgatcgacgagatgaagtcgatcatctcggcgcgcgtcgtcgagcggttcaggtagaggaacgggttcgacgggttcaactcgatggccgacgaataggtgctcaccgaattggtgtactgcttgatgagcgactgcgtgacggcgcgttcgaagagcacggtccatgcggggttgcttgcgttgagctcctgcacatactgcttgtcgagcatcaccagcgtgtcgggcgcgatgttgctctcgcggcacgagagggtgaggtattcgttgccgatgcgcttcttgaaatcgtcgacgcgttgcaggtgatagggtttggctgcgggaaccgagtcggggcgcatgagcgtgaacttgaacagcggcagcaggcgcatctcctcgtgtccgccgttgtggcccgtgatgcggtcgaagctgcctccggcgaacttgctgtcgaacgacagcaggcggtcgaagcgttgcgtggtgtcggcgtagatcgaataggtgctgtcgttcaggcgcgaacggtattcggcgattttccgctgggcgatcgagcggtcctctttggcgccctgcgggtcgcggagcagttcgcgcagccggccgcggtagatgtaggcgttggcgaagtcggggtatagcttgatggccgaggtgtagtcctccacggcgcgctcgatctcgcccagctgggcgtagacgcctgcgcggttgtagtagaccagcacgttgttgggcgagtagagcgccactttgtcgtaatcctccagcgcgcggttgtagtcgccgatctgcgtgcgcagcatcgcgcggttgaaataggtcagcgagttggtcgaatcgagctggatcaccttgtcgaaatcggccagcgcctgcatcgggcggttggtggcattgtagaccagtgcgcggttgaagtaggagagcaggtaggccgaatcgcactcgatggccttgttgaaatcggcctcggcctccttgtactgttcctgctggaggtgcagcccgccgcggcggttgtagccgttgggattctcgcggttggtgcgtatcgcggtgttgaaattctcgtaggcgcgcgtggtgtctttcaggtggaggtagctcaatccccggcagatgaaggcgtcggccaccttgttctcctggcggatgaacttgtcgaaatcgtcgatggcctccttgaactgctggttcagcaggcgcgtcacgccgcggctgtaataggggccaggcaggtcggggcgcagctcgatcgcctcgcggaagtcctgcaaagcgtcgtcgtagttgcccagacgcgagcgcgtgatagcgcggtaggtgtaggcctgcgtgtagacgggattgagccggatggccgtcgagaaatcgtcctcggcgcccagcaggtcgtcgaggttgtatttggcgatgccgcgcaggaagtagccttcgaaagcgtcctcgtcgaagcgcagcagggtgttcagcgtgcggatggcctcctggtagtcgttgttcatcatgcacgaacgtccgacccagaaaaaatattcccggttgtactgtgcgtgggctttcgtgccgcacagcagggcggttcccaatatgattccggcgatgagtttccgcatgctgactgattttgctctttaaacggtctttccgagcgatttattattcctgttcgtatccgaaccggcgtaattgccgctcgttgttgcgccagtcgtcgctgaccttgacgaacaactggaggaaaactttcttgccgaggaactgttccatgtcttcgcgcgccgtctgtccgactctcttcagcttctcgcccttgtggccgatcaggatgcccttctgcgagtcgcgggccacgtagatcgtcgccgcgatgcggtcgatcgtcggctcctccttgtaactttcgatctcgatttcgcagcagtaggggatctccttgtcgtagaatttgaggatcttctcgcggatgatctccgaggcgaagaagcgcagcgtcttgtccgtaagcgtatccttggggtagaacgccgggccttcgggcagcagcgagaggatggtccggaacagcccttcgatgttgaaattctccttggccgacgtggggacgacctgcgccccggggatttcggcctgccatttgtcgaccagcgcttcgagcgcttcgggcgtcgagaggtcgatcttgttgatgaccacgacggtcggaatgccgctccggcggatgctgtcgacgatttcggccgagcgttcgctctgctccacggtgtccgtgacgtagaggatcacgtcggcgtcggtcagggcgcccgtcacgaacttcatcatcgactcctgcaacttgtacgagggcttcaggatgccgggcgtgtcggagtagacgatctggaaatcctcgcccgagacgatgcccatgatgcggtggcgtgtggtctgcgccttggaggtgatgatcgagagtttttcgcccacgagggcgttcatcagcgtcgatttgcccacgttgggattgccgatgatatttacgaagccggaacggtgcattttttttgctttattcgcagacaaaggtagggatttattcgaatttatcctatatttgttttacaatatgctaaaatcgcactgcctatgaaaaaatgagaacttttgatttttaatgccgctacggcggcacacgacatataaaagcgcatcggcttttcttcttacattcagaacttggacacttttgaatcacagagaggaattaaagttgatgctcgcgctgttttacggcgcgggcattcctttcatctttctgtgcaggcagtccaaggccttgaatgtggatgaacagagtttgtccgcgttttttgtgttttgacatttgctcgatgtaaaactctaactccttgaatgatgaaacgctttaatttgcttgtgtatgtttaccggggcataaacacgctggaagaaaaattcacccggaagaatcatcccgattacacatccgatttgagtaagcatatcctgatcgtgacgggcatatctatcggagcgacatttattacctcgctgctgaggggtgtagttatgagcatgttgctcggaaatttttctcctgattcgacagttggcatacgcatggcgatgtcttttcttgtagtgattccttttctgtgttgtgtcgcctactggatctattatttgaaacggcatttgtatttgttctcgacgaccggtcagaaaatcggatatggactgttcacttgtgtgatgcttgctattctgggaccgtctattttcccgctgcttatagctcttgttttgctgtccattgccatttcgatcgctttgttcctgttgagtgtcgtgatgacgatcattgccttgtttgacggaggaggttcgaaaaagaggcggttttcgctcgacaatggcgataaggtgaccgaaaaaacgggattcttcggcgaaaaatattatgaaggccggagcggaaaatcctatgaaaccgacgataacggcaggacgttctccgaaaagtagcattcctcaccgggtttcacataactgcaaaaaggctctcgtttccgagagcctttttgcaatgaagtcttgtaaaatgtagcctatcgccgcatcatcccgcccggcatcttgggcatcttcatgccgccgccggccacggccttcatcatcttgcgcgtgtcgtcgaactgcttcatcaggcggttgacgtcggccatcgtcgtacccgaacctttggcgatgcgttcgcgccggtgggcgttgatgatctcgggatgctcgcgctcggcgggggtcatcgacgagatgatcgcctcggtctgcttgaacacatcgtccggaatgtccacgttcttgagcatcttgcccatgccggggagcatcgacgcgaggtccttgaggttgcccatcttcttgatctgctgaatctgcgagatgaagtcgttgaagttgaacaggtttttgaccagtttctttttgagcttgcgagcctcctcctcgtcgaactgctcctgtgcgcgttccacgagcgacaccacgtcgcccatgcccaggattctgtcggccatgcgctcggggtggaacacctgcaaggcgtccatcttctcgccgctcgaaatgaacttgaggggcttgttgaccaccgaacggatcgaaatggccgcaccgccgcgggtgtcgccgtcgagcttggtgaggaccacgccgtcgaagtccagccgttcgttgaactcccgggcggtgttcacggcgtcctgacccgtcatggcgtcgacgacgaacagcgtctccgaaggtttcacggcggccttgatggccgtgatctcctgcatcatcgcctcgtccacggccagacggcccgcggtgtcgacgatcaccacgttgtaattcttctgccgggcgtacttgataccgttctcggcgatctcgacaggattcctgttaccctcctcggtgtagacctccacgccgatctgtccgccgagcactttcagctggtcgatggctgcgggacggtaaacgtcgcctgccaccagcagcacctggcggcccttcttcgacttgagcagcgaagccagcttgcccgagaaggtcgtcttacccgaaccttgcagacccgcgatcagaatcaccgcaggcgtgccctccagccggatgtccgtggccgtgccgcccatcagttcggccagctcgtcgcggacgatcttggtcatcatctgtcccggcttgacggctttgagcacgtcctggcccagggctttctgcttcacttcgtcggtaaaggtcttggcgaccttgtagttgacgtcggcgtcgatcagcgcgcggcggatctccttgagcgtctccgcgacgttgatctcggtgatgcgcccctcgcctttgagaattttgaacgaccgttcgagtttatctgttaaattttcaaacatgacttctgaaattatccgagcgcaaagataatcaataattcacaaagcacaatccgccgtggaaattttgttatgccgtgaaaaatagttatgtttacaactgaacctaaccgtcatgcaatgaagaaatttcttttcctgctgcttgccgtcacggccgggaccgctccggcgcaaaccctcgtctatcccggcgagcacgaaatgccacccgtcccgaagaccttcgacaacgaactgggcgtgcgctacggagcgcagctttacgtgggcgacgggcggggacccgaattgcaggccttttcgatcgactatgcccgttataatttttacaatatcggttttcgaacggggctgaacgtcttcgtcgacgaggatgccgagaactatttctccgtgccgctgcaattcacctggcggaccggacgtatcgcctcgtcctggcgccgggagagccgggagcggagtgtgcagaataattactacaacggctcttatgcagatccttacggcgcttattccggcggaggggcggacgtgggcagtacgtttctcaacgtgctgcttgcgatcctgccctcggggttcgaggtccatgcgggctttaccccggggctgatgtgcgggccgttcacgaccgaaggctattcgacgaccgacccttcgtggcggccctataccgtccggcagcgtttctcctgtacgttcgacgcgggtgcgcggctgatcatcccgatctggcggttcaacctcttcggcgacttcacctatcactgctacctgaccgataatttccgggccggggagtttcggccttcgcgctcctatatggggctgggtgtggggctgtcgttcaatttttaggagcgggattccggaacggtccctccgttacccggtccctccgttacccggtccgtccgtcgctaccggagcagtccggcttcgtaataaatcacgatttgctcgatcatccggtcctcgccctccctgtcgtattccgacttgaggttctgaccgaagattttcgagacgccctgccagaatcccgccacgaaaccgccgcggaactccttcaacacctcgtaggcggtgtattcggtttcgcggtcgatgagtttcagcagcacgcggccctgcgtgcgggtcatgtgtttcagcacgggggtgtattcgtccttgatctcgtggtagatttgtttgatatactccttctgggcctttttggtcggcaggcggcacaactcctcctccatcgtcgccatcttggccttggcgatctgcgcgatggggtagacctttttcacggcgtccaccagccggcggtagcggcgcaggtcgaccgggcggctgaagacgtagaccggcaggacgtggaccagcgggatcgaatcgcccttctcgaccgtccactcctgatgccagaagccacggcctccctgcgcctgcgcttgggaaagcgcggcggcgagcagggcgatgaggagtatccactttttcaacggcggcgaattttttgtacctttgcggcggagtccggatgaaaacccgtgcggttttgcatccggtttgccggggtgtctccggcaaagataacgattcaccgcgataaacgaattacgaacagcgaatattatgcttgaaaaaggactttccgcccgcagcgccgcaaccgtcgccgccggcaacacggccgccgcgatgggttcgggcgaccttgcggttttcgccacccccgcgatggtggcgctgatggagaacgccgccatgacggccgttgccggcgaacttcccgaaggcgcgaccaccgtcggctccgagatgaacgtcacgcacatcaagccgtcgggacttggcgccgaaatcaccgccacggccgtgcttgccgaagtcgaggggcgcaaactgaccttcaacgtcggggcccgcgacgccgaggggctgatcggcgagggcatccacatccgctacatcgtcgaccgggaaaaattcatggccaaggtaaagtaacggaaaagctccggatcttctgcgtctgcgaaaagacgtacagcttgatttgtagttatttatgccggatcgaaggattgggctctgtgtttggacagggctcgatccttttcgtttgtgtacaattctgttcaagtcgcccgatgcctgtaaatttctgtgcttatactacttaatcttgctgaattattggcggttgaatttgcataattgatttttttcgttatttttgccctacatccattacaactacatattgtaattatccgtaagactctcgcgaacctgccttcaatgtttcatccttaaacttcaaactatgaaaactcgcattttgactttgacagcagccctgcttctactgggtgggtttgtcgcatgcaacgactcggaagaatccgaatatatcggcactcctcccgtcacagcctccgcggacgtatcggcttttttcaagacctatctgccttcgagttccagttcgcatcccgagccggaattcaatttcagcgagatcgatgatcgcgacatcgaatgttttgtgatcaacagcatggaagagttcgaggccgttgcacctccttcggtcgagctgccagtaatcgactttgacaaatatacccttattattggacagcattggatggggcgtcccggatactctttcgagaagcaggtcgtcgataccgaatccgataagatgacattgaatttggtgtataagcaactgaagggtgggactccggcgattatgactattttttatttctggggactatacgacaaacttcccgaaaaaacgcttactgtcaacaaaatcataatttagatattcttatatcatgaaaaagctgctttctcttatcattgcagtcataacattttatggttgccaggatgacattttgtcagaggaatatcaagaaaacgttcccgcgacccgtgcgtctgtgggttcgtctgattattattattattatttggtgtgacggtgtgaaaatcccactaacggtcaacgagaacaagtcgtatgttttggttgaaaccgcaaaatttgaaagtgttcgcaaatcggccgtaaatatccgtaggggaaataccagaactattgataactatgctgcgctgggcataagatcgtcaaaagagttccgcatgcaaaaaagtcttacgtcgtttacgctggataacgcccaacaaaaatcgattaacccgcaggatgtagtgtatgaggctccctattttaaaacaagcgatggagccgatctcggcataacgaatgtattcagcgtacaactgacaggagagcaagaccttgccaaacttcaaaaaatcgcggaagagtataatctggagatattgggagaaaacaaattcgacccgagtatctattatctttcgtgtacaaaggagtcgaaagggaatgcgctcgaaatggcgaattttatgtatgaatcgggcgcgtttgagtatgcaacacccgagtttatcgttgagtcgatgcccgacgccgctccgaacgatacctatttcagctatcaatggaatctgaaaaacgtctcttatccggggatcgatatcaattatgtgaacgcaaggaatgcctttgcttttccatatatcaacgatattatcgttgcggttgtcgataacggtgtttaataaccatgatgatttacatttgtataatgtcagttacaacgctcacacgggaggaattccaagtgggctatacggagatcacggcacaaaggttgccggtgttatcggagccacggctaataatggcaaaggcattgcaggcgttgcatccggagtgaaaatcatgcccatcagtatttgttatactgataacgagcttggcatagctgcctccaccacgaccaattttgcgaatgcaattcggtttgccgcaaataatggtgcgcgcgtaattaataattcatggtcatttgatacatcttctccaatatccgaaatcaataatgctgtaacatatgctcatggtaaaggatgcatcgttgttttttcatcgggcaataaaggcagtgctgtatcacagccggcagcgggagcaccttctgcaacgttagtagtaggtgcaatagatcggaatgggtacaaatcggatttctccggttatggttcttcattggatgttgtcgctcccgggcgtgaaatctggacaacagatgtgaccggtggatatacttgtgtgctgggcacatcttttgctgctccccatgtttccggcatcgtggctttgatatgggcaacggatcccgatctttcggtatggcgggtacgcaatattatcgaacaaactacccgaaagatcggcggcaacacttatggtgtcgatccgcttcgattgaacggattatggaaccaatttgtgggttatggtctggtaaatgcctatgcagctgtatcagcggtttcggggtccgctcccaccgctgattttgcgtcggataccgatgaacccgtacttcacgatatcgaatgtcaggtgttgaaaaatggtctatccacatcttccggggtacatctggcattgattccgcaagggtactcttactaaattgatattggagttcctgacttacaaactgctgataatttggctgtaaatcagaggttggataaaaatattttatccaacctctgattatactgttatggggcaaacccgtgatcggcaatattctgggcgcacgacgcatccggaacttttcggtcaaagcccgatcaggacgtgttcgagccagatcaccgcgatgcccgccagatagccggacagggccagcagcgagatgcgtttgaggtaccagccgaaattgatcttttcgagtcccatcgccacgacgccggccgccgagccgatgatcagcagactgccgcccacgccggcgcagtaggtcagcaggtgccagaacagcccgtccgccacgaaactctgtgcgaaagccgggtcggcgctcgccgcagccgttgcgacgtcggccaccgggtacatgcccatgcaggccgccaccagcggcacgttgtccaccaccgacgagaggatgccgatggcgcccgcgatggtgaacacttcgtggacattcttgtccagccagtcggccatgtcggtcagcacgccgccggtctgcaacgcacccacggccatcaggatgccgaggaaaaagagaatcgtcggcatgtcgatgtgcttgaggactttggacacgcgcggctggatcgactcctccatgttgcggatgctgcgtttgcggtcgtagatgatttcggtcagaatccacatgaatcccagcgacaccatcatgcccatgtagggcggcagtccggtgaggcttttgaacaccggcacgaacagcagacttacgacgcccacaataaggatgaatagccgcaggcgcggaccgatgcattcggggcatcccgatgcgagggccttggcgctgaccgcggcggcggggcggtcggcgacgtagcggctggcgatggccgcagggatcacgaccgacacgaggcacggcaggaagaggttggcgatcaggttggcggccgtgacgttgccgcgcatccacagcatgatggtcgtcacgtcgccgatgggcgaccaggcgccgccgctgttcgcggcgatgacgatcacgctggcgaaaatccaccgttccttcttgttggcgatcaaccgccgcagcagcatgaccatgatgatcgtggtggtcatgttgtccagtgcggccgacatgaagaaggtgatgatcgccagcagccacatcagtttgcgcttgttgcgcgtggtgatgtggtcggtgatgacgttgaagccgccgtagctgtcgatcaggtccacgatggtcatggccccgatcaggaagaccaggatttcgcacgtgtcgcccagctggtccaccagctcgtgctgaatgtgcgggtcgttgcccaggaggctgaacacggtccagatcgctccggccatcagcagggcgacggccgatttgtcgatcctggttttgtgctccagcgcgatgaacagatagcccaccacgaagagcagaatcattgtcggaatcatatcgtttgcgtttatttacagggtaactgaagcaaagatacgaaaaatccggcagaggtccggttttgtccctgccaattttgcatccgggggttggtttttgcgattttttgtttatctttgcagtcgctttcgagcgaatgtttgagctgtggtgtaatggtaacacagcagattttggttctgtcgttctgggttcgaatcccggcagctcaacacgaaaaggcggtcatgcgaccgcctttttcgtacatacgtttgtttagcggatcttgcggtgtgagatgagcgcggcgatccacagcaggatgaccgagccgatgacggccgtcgccagactgcccagcgtgccgacgggaacccatccgaagagcgaaaagagccagccgcccagtacgccgccgataagcccgacgatcaggttgacgaagagtcccgaacctcctcccttgacgatcaggttggcgatccatccggcggccagtccgatcagcagataccatagaaaatacatagtcttgcattttggaacgcttttcggagtgcaaaatccgtacccggccgggccagggcgttttataacgcctttttcagcgcttttgccagctgatcgggacacgacgtgccgcggccccggcagtcgatgccttcgagccgggcgacggcttccgcggccgtcatcccgcgcacgagcgccgcgattccctgctggttgccgtggcagccgcccgtgaaggagacgcttcggacgacgccgttttcgagttcgacgtcgatttgccgggagcaggttccctggcagacgtgtgttattttctgtgtcatggagttacgattttccggtttgcgggggcgaagatacgaaattcggggcctttcacaaaatgttgaaaacttcctgctccggaattttgaaagtcggggaataatggagacttttgtgacccgcaaaggtatccttcgtcccgtcggggcggaggataagagggaatcgggtgcgaatcccggacagttcccgctgctgtatgcgctttatgccgcaggcgaatcgtcgagccactgtcccgcgggggacgggaaggctgcctgcgggtcggtgcgagtcagaagacctgcctttgcgcatgcaatgtcggccctgcggggaaacggggcctgttgtgaaacgtatatactcatattacaatggattacacgcagatttccatcatcaaacgtgatggtaaaaccgagcctttttctctggataaaatcgtccgcgccatcacgaaggcctttcgcgcgggcggcataacggacgaggggcaggccgtcgagcagatcgcatccgacgtggcggcggcaattacgaaggccgagatttcggtcgaggagattcaggacatggtcgaggagcggctgatgaaacgcaacccctcgatcgccaaacgttatatcatctaccgcgagtggcgcaacgtcgaacgcgaccgccgctcgtcgatcaagagcgtcatggacggcatcgtgaccgtcgagaagaacgacatcaacctttcgaacgccaacatgtcgtcgcacacgcccgcggggcagatgatgaccttcgcctcggagatcaccaaggactacgccctgaaatatctggtgggcgtgcgtcacggccgcgcccaccgcgacggggacatccacattcacgacctggactactatcccacgaagaccacgacgtgcattcagtacgatctgggtgacatctacgaacggggattctcgacgaagaacggctcggtgcgcacgccgcagtcgatccagagctacgccacgctggccacgatcgtcttccagaccaaccagaacgagcagcacggcgggcagtcgatcccggcgttcgaccatttcatggctccgggcgtgctgaaaaccttccgccgtcacctgaccgacatgacgctgttcctgtgcggcgtgcggggcggcgtgacgctggagcgcgccgagctgaaggccctggtcgccgaacacgtgccgacgatcgaaccctgcgagacggcggtggggcgtctgttcgccgccctgcgccagtcgggcgtggaggtcgccgacgaggacatccgacgcatctggcggcaggcatacgacacgacgcgccgcgagacccatcaggcgatggagggattcatccacaacctcaatacgatgcattcgcgcggcggcaaccaggtggtgttcagctcggtgaactacggcacggacttttcgcccgagggccgcatggtcatccgcgaactgctttccgccacgatcgaggggctggggcacggcgaagtgccggtcttcccgatccagatttttaaggtcaaggagggtgtttcgtggtccgaagaggactatgccgcagcggtgaaggacttcgacaaggcgctggccggggagatcaagttcaaaactccgaacttcgacctgctgatcgaggcgtgccgcaccacgtcggtggcgctgttccccaacttcatgtttctcgacgcaccgttcaaccgccacgagaagtggcgcatcgacgatcccgaccgcttccgctacgaggtggcgacgatggggtgccgtacgcgcgtcttcgagaatctgcacggcgaaaagtcgtcgtgggggcgcggcaacctctccttcacgtcgatgaacctgccgcggctggccatcgaggcgatgcgcgaggccggggacatgattcccgacggcaacaaacacgcgatccgcaaggaggcgcgcgaaattttcctcgaatcggtgcgcaagaccgccacgatgatggccgagcagctctacgaacgctactgcttccagcgcacggccctcgcgcggcagttcccgtttatgatgtcgaacgatgtctggaagggcggcggccggttgcagcccaacgacgaggtgggcgacgtgctcaagcacggcacgctgggcatcggcttcatcggcggacacaacgcgatggtggcgatttacggcgaaggccatgcgacctcgaaggaggcgtggcagacgctctacgacgccgtgacggtgatgaaccgcgtggtcgaggagtacaaggccaaatacgggctgaactattcggtgctggcgaccccggccgaggggttgagcggacgcttcacgcgcatggaccgcaagcgttacggggagattccgggcgtcaccgaccgcgactactacgtcaactcgttccacgtcgacgtgcgcgagccggtttccatcgtcgagaaaatccgcctcgaagcgccgttccacgccatcacgcgcggcgggcacatcacctacgtcgaactcgacggcgaggcccggaagaatcccgtggcgatcctcaagatcgtcaaggtgatgcaggacgaggggatcggctacggctcgatcaaccatccgatcgacacctgccgcaagtgcggccaccgcggggtgatctactcgaaatgtcccgtctgcggttcggacgacatcctgcgcatgcgccgcatcacgggttacctgacgggcagcctcgaatcgtggaactcggccaagcaggccgaggagcgcgaccgggtaaagcaccggtaatttcgattctcaccggcatcttttgcacttcccttgcggggcgaaacagttacatacgttcgtatgctcctgcttcgccccacttcacgaagcccgaaaaccgctttgcgataatcgaaattggcggccccccccctgtccgcccgcctaaaatcaaaattcacccggcggaagaattcctttttgccgccgtctccggtcgcgtgcggcaagtccccgcctaaagtttagaggtggatcagatttgtaaacacggcgttccgccgtgaatcgagaccgacggagttgtattcatgttatgaaaacgcaatggaattattaagaatcatcggcatctatcccgaaaccatctccgacggttacgggctgcgctatgcgatctatttcgcggggtgcgcgcaccgttgtcccggctgccacaaccccgagagccacgatccccggcggggcgagccgctgaccgtggagcgtgccgaaaccatctgcgctgcaatcgccgcgaatccgattctcgacggggtgacgctcagcggcggcgatccgctgttgcagcccgaagccatggcggcctttctgcggctggtgaaggagcgcacgggacagaacgtctggtgctatacgggctatacgctcgaagagtgtctcgccgacccggcccgccgggagtgcttgcggtggatcgacacgctggtcgacggacgctacgtcgaggcgctgcgcgatctgtcgctcgatttccgggggagttccaaccagcggatcatcgacgtcggggccttgcacctgttcggataggtgtgtgaaaaaagagctgcaaattcttgcagctcttttttatgcgcgggttatctctactgacgctggaggtccgaattgtcggctacgaccatgtttttgtcgatgcgcagcgtcacattgccgtcgacctcgatcagcagggtggtctccttgatctccttcacgacgccgtagatgccgccggcggtgatgactttgtcgccttttttcagaccgttgcggaactcctgcatctgtttgcggcgcttggcctcgggacgccacatgaacaaccagagaaccagcaccatgaggccgatcataataatgaaactgtactgctgcatgaatcccggttgaggctctatggggaccgtctgaagaaaattaatcataattgtattcgttttaagtgtttattccattgaacgaagcaaaggtacaaattattgccgaataaacaaggatttattttatgtccgcttccacgaacagccgcaggggccgctgccctcccgccagcgtgatgtccagcgccttgagttgccagccccgttcgccgcgcgaatcgaaggtgagcgtcacctgccgtgcgtcgcccggtgcaatcggttgtgcgtcaaattcgagcgtcgtgcatccgcagctgcgccggtaggaggcgatggccatgggacggcttgcgtcgttggccagccagaggcgcagcacggcgatttcgccggacccgaggcgtccgaaacgcacggtgtccgtgcctcccgtggtgagaatcgaatccgttagcgagataatccggcccttgcgttcgaccgcacggggagatgtgccgcagccagcggcgagtgccgccagggcgaggatcgcgagcatgcgggtcatggccggcaggggtcagatcaggccgcgcccggcctttttgatgcgtccttccgcggtcagcgactcgacgatcttgtccagcacgccgttgatgaaggtgctgctgcccggggtggagtagtatttcgaaatttcgatccactcgtcgagcgtcaccttgacgggaaccgacgggaacgaagtcagctcggccatcgccgtgccgatgatcaggttgtccatgaagacgatgcgctccacgtcccagttggccgtgaacttctcgatgtagtcctggaaggcggagtagttgaccagcgacttttcgaacagcgtcttgacgaattcggggtcctcgctgcttttgaacttcgcgggaaccttcagttcggtgtgcgagacgcgcaggttcgaaagcgtgcgcaggaccatgatcacgatgtagggaaggtcgtcggtccagaggatcgacatctcctccagcacgtcgtccagcgcctcgcagctctgcaactccttgaagaagtcctcgagcagttttttgtcgtcgtcgaacgagcgctcctcgcgctgcatgtagtccttgtagtagtcgctctcggtcaactgcgcgtagagcgtgcggatcagttcgggatagcgttcccatcccagtttgcgggccgccacgtgatcgttcaccgcgtcgctgttggcgatggtgcggatcacggcgttgtccacgaacttggtgttggggttgaggtcttcgaatgtcggcagtttcttctgtttggccagctcctgacgctgttcggcgtaacgcgcgatctccacggggaggatcagtatctggaaatagaggtcataggccttgtcgacggacgccatcagcgttttttccgacgccatcatgttatccgcgcccgatttgagatgggcgaacagcgccttgacgacctttatacggagtaatcttctgctcaacatttttttagaacgatttttaacggccgcaaaaatacaactaaaaatcaagaataaaaaattaagccgggagaattctttctccgggcgatttccgcgcggccgtcgcggcggattccggcgtatccgaaaaaacgggaggcgcgatggcctcccgatgctgcaactacttttcccggatcgactttttcttgcctacatgactttgatagacacaataaacgattccggccacgagcaggacaaggatgcaatagccggtgcttcgggcgctggctttgagcatgctttcgagagacatttccggatagagaagcgcgaagacacaaaggaaatagatgaagcaggcgcccatgtttcgcaaggtgaggaaccgggaaatattcaaatcgtcgtctttcgtctcttttgcatcgggaaccggacacgtatcgggacgtttatccggaccctttctgattcggctccaaaaatagacggccgaaaagatcacgatgcttacgatcgtataaatgatgatgcaccgcacgaggcgtcccggagagcaatcttttccgggtgtgggcagaaacgctataatcatcagaacgacgtagaaattagccaatcctttgagaaacactttcagctcggttttgttcatggcagattcattttaaattccctcttcggcctcgcctccgaaataatagcaatggcgttttatattggtcctaatttaggacattggattttgaaataagagaggcgaacggataaatagaaaaaaatatactgaattgcgaaagaaatatactctgccgaccgcctgcggggctctttgcatcctgatttttaatttttaattcttaatttttaatttgcttttgcctatctttgcacccgtatggaacaattggaagaaaaacagcctttcgacgtgatcgtcatcggggcgggcgctgcgggcatgatggccgcgggtacggcggcgcgcagcggcaggcgcgtgctgctgatcgaaaagatggagaagtcgggccgcaaggtccgcatcaccggcaagggacgatgcaacgtcaccaacgcgcgtccggccgaggaattcgccgatcaggtgcgcaccaacgccgaatttttcaaggtcgcgttctcggagttcaacaaccgggcggcgatcaagtttttcgaacgcgcaggcgtgaaactcgacatcgaacgcggcgaccgggtctttccgcagagcggcaaggcgtgggacatcgccaacgccctgctggagttctgcgtcgaaaacggcgtcaagatcatctacaatacgcgtgttacggagattctgaccctcggggaccgggtcttcggtgtgaaatacatcaaccggcgcggtttcgaacgcaaggaggagtgcgcgcaggtgatcctcgccacgggcggcgtctcctatcccgcgaccggatcgacgggcgacggctatgccttcgccgccgacctgggccatacgatcgagccgctgcgtccgtcgctgacgccgctcttgtcgtcgcacgcccagatgagatacctcgacaaggtgctgctgcgcaacgtgcgcgcgacgctttatgtcgataacgaacccgtgcgcgaggagttcggcgagatcggattttccgaccgcggcatcgagggagccgtggcgctgcgcatgagccgcgatgcggtggacgccctgatcgaagagaagcgcgtgaagctggtcctcgacctgaaacccgcgctcacggaggaggtgctgcacgaacgcatcgcccgtgaaatcgccgggctgcaacccaacgagttcttcggcgaactgctgcgcaagctggttcccaagccgctggtgatgccgctggcgcaggaggtggacatccgtgcgaactgttacgtcggcaaaatcaccgaggaacagatcacgcgtctggtgcgtacgctcaagggactgactttcccgatcacggactatgcgccgttcgaatacgccgtggtgacggccggcggcgtgcgctgtgacgaagtgaatccctatacgatggagtcgctgaaagtcaaaggattgtattttgccggcgaggtgctcgacatcgacgccaatacgggcggttacaacctccagatcgccttttcgacgggccgcctggccggatcgctgaaaaaatagacgttatgaagatcgtcggccatcccatttctttccggttgcccgggcgggtttccgaactgcgcaaccggctctcacgcgcccgttatttccgcggtcacggagtacattcgccgttcgtctacgacattgtgcgcagcgtcttcatgcgcgacgacctgctgccggggcgccgggacctgtacgaagccctgctcacggcgggcgtttcccgccgtcgggcggtgcagttgcagaatctgatgattcattgcggctatacgacctttggcctgaatcgtgcggatgctgaattctgcgttgccacgtgcggcctgccgcgccctgcgacgctcgcgctggtgcgtgcggcggccgaagcggggcataccgtggcgctgatgtcgccctacgacggctgcgaacggcaggcgctgtgcgggcagattatcgcgggacacgcttcgacgacggtggataaccgcggttacctgctgattttcaacaaccatttgccgaaacaacatttcaggatatgaaggtatacacgaaaacgggcgacaagggaatgacctcgctgatcggcggcgagcgggtcttcaagaccgacgaacgggtcgaggcttacggctcggtcgacgaactggccgctttcacggccctgctggccgacaacatgcgcggcgacgctgcgctggcgtcgtcggtcggcgacctgaaccgcattctttcgcggctgatgtcggtcgaggcgctgctggccacggggcagtcggggagcgacaaggtcgctccgctggacccggagaccgttgcatggctcgaagggcgcatcgacgccatgcaggaggttctgaaaccgattgataaattcacgattccgggcggaaacgccgtggtgtcgatgtgccacgtgtgccgcaccgtctgccggcgcgccgaacgcgccgcgctccgtgccgacgccagatacggtgtcgactccacggcgctggcctggttgaaccggctttcggactatttctacctgctggggcgcaccctcacggcccattatgccgtcgacgaggtcctgtggattccctgacctggccgggtatgtaaaatgcgaagcggcacattccgggaatcgtgccgcttcgcattgatattattttgaggccgtcggcctcaaaatcgctttttagtattcctcctcgttgaagaagaaatcgtccttggaggggtagtcgggccagatgtcttcgatagattcgtagatttcaccctcgtcttctatctcctgcaggttttcgagcacttcgagcggcgcacccgaacgtactgcatagtcgatgagttcatctttcgttgcgggccagggggcatcttcgagtttcgatgccagttcaagcgtccaatacatagtcacaatatttttaagttcccaattgtcaacggattatttgtcctcaaggggtgttaacccgttatggctgatttgcaaaagtataaaaaaaacgagaaaaacaaagaaaaatcggcaaaacatcgtgcgtgtgttattatatggttggtaaccaatgctttgaacggtggaaaaaactcggctgcaaattgcggcgaaagggttttgcctcctccggcgggcggcgtcctgtggaatatgccgctgtcgttttttttgcggagttcgttttttatcgtatttttgttacgattcgaaataatacgacttattttaaaaacgaaaaccccgactccatgatccgcatcagccgctttttcctgccttttctctgttgcctgacggcgcccgtccttgccggtacgcaaacccgctgggaggtggttcccgacagcacggccatcgtgtggaatgtccgcgagggcgattcgcaccgggaccatatcgaaatgagcggattgcggatttccgccgtcctgcgctacggtgtcggcgccgacggcggtttccggttcgaacgcagtatcgtgtggccgatgctgcgcaccatcccgaacaatacgcacggttcgctgatgcggcgtttcgcgtgggacgttccccggatgctctcggtcaatgagaattgccttcagcaggagaaggtccgccggatcgtgctcgacggcacgatgaccgtcgagagcgactggacggcggtcaaaggctcgctttcgctgacgcgtgtccttttcccgtcggtcgacgaggctgccttctgcgaaaaatacatcctgaagaatacgggcgagaagccgctttacgtcgagattccccgggcgcgttcggtgatccggacagctccggcaaagggcgtggagggcagttacgaactggtggccgagatttgcggcgacacggcgctgatgctcgctccgcgggccgaggtcgctttcggggcctttttcagcggtcgccggtccggggacgaagccttggcgctgaacgtcgacgcggagtgcgccaaacgccgtgcgctggtggccgaatggcagcgcaatctggtgctggacacccccgatcccgtgatcgacgccatgttcgcctttgcgaaaatccgcgctgcggagagcatctacgacaccaagggcggtctgatgcacggtcccggcggcgagcgtttctatgccgcgatctgggccaacgaccaggccgagtacatcaacccgttcttccccttcctgggctacgaccggggcaaccgctcggcgctctgctcgttcggctatttcgcccgctacatgaatcccgactaccggccgattcccagttcgatcatagccgaaggaaccgacatctggaacggcgcgggcgaccgcggcgatgcagccatgatcgcctacggtgcggcgcgttatgcgctggcgcgcggcgatgccgccgaagcggccgaagtgtggccgttggtggagtggtgtctggagtactgccgccgccggctgaccggcgacggtgtggtggcctccgattcggacgaactggaaggccgcttcccggccggggacgccaacctgtgcacctcgtcgctttattacgacgcgctgctctcggccgcaatgctgggccgcgaactgcataagcccgcccggcagctggccgcctacgaacgtcaggccgccgcgctgcggaaaaacatcgaccgccatttcgggggcatggtcgagggcttcgacacctatcgttattatacgggcaacgaccgtttgcgtgcgtggatctgcattccgttgaccgtcggcatcgacgaacggaaggaggcgaccgtcgaggcgctcttttcgccgaaactgtggaccgaaaacggtctgctgacccggtcgggcgacaagaccttctgggaccggtcgacgctctacgccctgcgcggggtctacgcctcgggcgagaccgagaaagccaccggctatttgtcctattattccggggtgcgcctgctgggcgaccatgttccctacgccatcgaggcgtggcccgaaggttcccagcgtcatctttcggccgagagcggcctttactgccgcatcctgaccgaaggggtgttcggaatccgtccgacggggttccggtcgtttaccctgacgccgcgcctgcccgcggcgtgggaccgcatgaacctgcgcaacgtgcgcgccttcggctcggcgttcgacatcgaggtgcgccgtgcggcgaaggggatggaggtcgccgtgacgcaggacgggcgggaggtcgtccgcaagaggctccgcgcggggcagagcctcggggtgacgctggaatagaaaaagagagggaggtttccgaaagcctccctcgtttatttcaccgcgatgtagaacaggtcgaaacaaccgtctcccaccggttcgatgcggtagtcgtccatgcggatcgaggtcgtcagcccggtgttttcccggaggagcttgcggcggttcatgcggttgaggatgtcgtaggggatttgcagcatccagcgcggcaggcggtgctggaggtcgagaatgtcgaagcgcgtgatgcgtccgacgccgcggcggttttccgcatagtagtccatcaccttttcgttgccgaagaccccgagggtttcgatctccgaaaaccgtgcggcgagcagcctgcggagttgttcggccgtgtattcgcgcacgtgccacgggttgcgggtgagcgacatcggggcgttgggggtcgtcacgatgaaccgtcccccggggcgcagcacccggtgtatttcgcgcacgaactccgcatcgcgtttgatatgctcgatcacctggaacgagatcacgcagtcgaaacttcggtcggggaagtccagcggcgggaccactgcctgccggaactcgacgttggggcggtcgagcagctccggcgccggggcgtgcttgtcgacggtgacgaaccgccgcgcccggggcgccgctacctcgatgccgtagccggctccggttccgatttcgagcacgtcgcccgcgatgcgcgccgaggcggcgtggtaggccagcagcgagcgctggaaaacgaaattgtccgaggcttccgccgaaacgcgctccgcggtgttaatcttcgccatgtttccggattttgatgcctttttcgccggcttcgaccgcgccgcgcttgaggagcatgcccagcgagcgtttgaaaacctttttgctcgttcccgtgaggcgcgtcacctcctcgggggcgctgtcgtcgttcaggggcaggaatccgccgttgtcgcggaccagctggagcagcacctccgccgagtccttcacctgtgcgaatcccgtctgctggaggctcacgtcgatgcggttgtcctcggtgatacgcctaacgtaacctttcagccggtcgccgacggccacgggacggaagatctggttgcggtagatcatgccccagtggcggttgttgacgatcacgcggaagccgatttcactctccgaagccaccagcagcgagacctcctcgcggggtttcaccgtgatcaggtcgttgtttatgaaactcttgagtttggtcgtggccacgcagcggcccgtgatgttgtcttcgtagaggtagacgatgtagctgtgtccggccaggatgccgccctgctggttgcggttggggaggaacaggtccttgccgtgcagtccccagtcgaggaaagccccgtgggccgtcttgtccaccacgcgcagatagcccgcttcgccttcgcgcagcagcggcgtttcggtcgtcgccacgaggcggtcctccgagtcgtggtagaggaagacctctttccggtcgccgaccttgtccgtcagcgaagtgtagcggttggggagcagcacttcgttctgctcctcgtcggcgaggtataggccgtattccgatacgcggcttacggtgagggtttgtatgcgtcctgctttcaacatggtttttccggtatatacgctgcaaaagtacgtttattttcgtccgaatccaaacttcgcgggccgtactgccggaagatgcggcggatttgccggcttgcggagcgaaagttttgcggattggccgaaaaaccgtatctttacgaaacgtaaaaatctcccgaaatgatgaaactacgccgatttctgttcctgctctgggcgggattgctggtagcggccgccgcgtgcgcccagcctgtcagcacgctttacgacaagaccgaataccgtatcgccatgcgcgacagcgtgcgcctgcacacctcggtcttcacgcccaaggcccccggcaaggccccgataatcattttccggacgccttacggtacgggaccttacggcgagggacagtttcccggcagtttcgaaaaaggctacatgcgcagctacgtcgaccgcggctacatcatcgtccagcaggacgtccggggccgctacatgagcgagggcgagttcatgcacgtgcgtcccgcgggcttcggcagcgtggacgagacgacggacagctacgatacggtggactggctggtgaagaacattcccggcaacaacggccgtgtgggtttcgcgggatgctcctacccgggattctacgccctgatgggcggtttgagcgggcatccggccgtgaaggccgtttcgccgcaggcccccgttacggactggtacatgggcgacgacgtgcaccacaacggcgtgctgatgctgagcgacgccgtgcggttcctcaattcgatgaacacgcccgctggacacgagccgaccgacaagatgccgcggcgcgggctgacgatctcgcccgacgaacgcacgttcttcctcacggagcgccccacgcgggctgacctgacgaaactgctggcacccaatgcgttctgggaggagatggccgaacatcccgactacgacgagtggtggcgcgcgcgcgacacgcgccgggcctgctacaacatccgtcccgcgatgctggtcgtgggcggcacgttcgacgccgaggattgctacggggcctggaacctttacaaagccgtcctgcgccagagcgcccggactccgctccatctggtcgtcgggccgtgggcccacggggcatggcgcggcgacgggcgtacgctgggcgacttcgatttcggagaggaggcctccggagcctactatatggaacatttcgaggcgccctttttcgactgctacctctgggcgcgcgacacggtcgaccggctgccgcccgtggcggctttctcgtcgggcgacaaccgctggcatacgttcgggcggtggacgccttccgaggcccgcaaactgactctttacctcgccgacggcggccgcatcacgaccgaaaaaccgacggtgaaaaactcctcgacgagctatacgtccgatcctgccgaccccgtgccgtatatcgcaacctccggcacgcggcgtcccaaggagtatatgatcgccgaccagcggtttctggagggccgcaaggacgtgctgacgttcgtgaccgaaccgcttgcggaagacgtgacccttgccggtccggtcgaggcttcgctgaaagtggccctttcgacctcggatgccgatttcgtcgtgaaactgatcgacgtttaccccgacgagggtgaaaaggccggcatgcagatgctcgtccgcggcgacgtggtgcgcggccgttaccgcgacggcttcacgcgtccgaaagccttcgtgccgggcaaccccgagaccgtgcctttccgcacgaccgacatcgcccacacgttccgcgccggacaccggatcatggtgcaggtgcagagttcgtggttcccgctcacggagcgcaatccccagcagttcatcgacctgtggcgctgtgcggcgtcggatttcgtgccctgccgggtgacgcttttccaccagcgcgaccgcgcgtcgtcgctgaccgtctataagctctgattttcgtggaactccgcatcgccctctgccagtgcgacatcgcctgggaacagcccgcgcggaacctcgcgcggctcgaaccgatggtcgctgccgccgaagcggatgtcgtgctgctgcccgaactgttcgccacgggcttcacgctcgatcccgccggagtggccgacggggccggcggggcggtcgtcacggccctgcgccgctgggccgcccgatacggcaaggcggtcgcaggcagcgtcgccgttgccgaaaacggacgtttctataaccggatgtatttcgtgaaaccctcgggcgaatttatcggctatgataaacgccatctgttcgcacccggcggcgaagcgcgccagtacacgcccggcgacagccgtgcggtggtcgaatacggaggcgtgcggttcctgctgctcgtctgttacgatttgcgttttccggtctggagccgttgccggggcgattacgacgccattctgtgctgcgcctcgtggcctgcgccgcggcgcgaagtgtggcggacgctgctgcgcgcccgggccatcgaaaaccagtgctatgcggccggggcgaatcgggtgggggatgaccctgcggcccgttacgccggggattcggcgttggtcgacttcaagggccgcacgatggccgaagccggcggcggggaacgaattctgacgggcgtgttcgacacggaggcgctggcggcgttccgcgaaaaattccccgcatggcgggatgccgacgaattcgttttaaaatagacgtgtcatgcgcgcgggggacgccaatgcctgttatttttcccttcagacgattatttccgctgatttattttgaattcagcggaatttgaatacctttgttttcagctatgaaacgatctgacagcgatagaacgggttttcgttcgggaaatgaaacgggaggtaaatttcttccccattggctctcggctgtcgatcgacttaccccccccccccccccccctcgcgctgttccggttgaatttctgaatccggctttccgcgattatataatgactctgacaaggggttgttgtgttttgtcgtgtcgtatctcgaaatcactctcatccaataaaaaatgcgtatgaaatccaaaatctttacatcgttcctgttggcggcagtgctgctgtcgggatgcaagaaggacgatccggctccggataaggcgactttgtcggtcagtccccaaactgcgattgcctttacggccgcggcgacggagacctttaccgtaagggtcgtcaccaatcaaccggcgtggaaagccgagtcttcgcaaagctggtgcaaggtcgctgcgggggagggtcagtttacggtttccgccgatcccaatacgtcggaaacagctccgacgccggcggtgattacggtgacggccgggagtgaaaaggcgacgattgatgtcacgcagtccgccgccgggaaggagcaatatcccgataccgaggccaaactgaagcaggctatcgccaaagtgtggacttttgcggagagttcgaactatgtttcgctcgagttcacgaccgacggcctttatacgtttttatccaaaacgccctttacccgggctgcggagaataatatctacctgctgtcgggcgcctattccgttgctgccgatctgcacgaactcacgttgagcgatttcggcaaaatcaccatcagcgacgtggggaacggcaaagcctccatgacgatcgccccgaccggcggaactccctccgcggcggaactcgacgagcagcgtttcgtaactcccccggcgtcggcggataagaagatcaaacgggtcgagtcgaaagaacctacggagggaaacggcgctatcgaatacagttacgatgcgaatcggcggatgtcgaagattaaggtaacacagggcggcctgacgctggaaattccgatcaattacgaggatggcaaagtctggtatcagttcgaaggcggcgaggtcctcggagagccgggcgtgtttaaggttacctatacgctcaatgcggcggggctggcccgctcttcggttattcagcacaaaggcgtcgtgctctataagatatactatacttataacaaccagaggcagctggtctcctatcggatgacggacaatgccgggaaactcgacgggttttgcaatgccacgtgggtgaacgggaatgtggtgagcacttattccgagagcgcgcacacctgcgacggcagttatgatgagtatgacgggcataaatattaccatcacgaccataacggcgacggcattttcaaccaggaagatattatcacccgcgagacggaccatagcacgtacagctattcggcccgggagaacaagggtggctacatgtatccgatcgttacgcccgatatattcggctcttccgatgttttcgatcagttgggccagtggatcggcgtgctcggcgtctcctgcaagcacctgatgtcggaacatgcggatgccgacggtgcgttgacctaccaattcgacgccgaagggtatcctacgcgcgtcgacgtgtcgttcccggagaatccttccgataactggtacatcctccagacctacgagtagggccgttaataccggtgattcgtgtaaagtccgtccgaaatgccgcaaggcattcgggcggacttcgttttttcagcggcggaaccctgaccgcgacaactgcggagaagacaatgtattgaaaaaaaacgtatctttgcacgttgctgatttgcgatccaataaaccggacgttccgcacgtttacatacctgaaatggaagatacgatcaaaatactgggcgcccgggttcacaacctcaagaacgtggacctcgaaattccgcgccgcaaactggtagtcgtcaccggcctctcggggtcgggcaaatcgtcgctggccttcgacacgatctacgccgaggggcagcggcgctacatggagacgctgtcgacctacgcgcggcagttcgtggggacgatggagcgtcccgacgtggacaagatcacggggttaagccccgtggtggccatcgaacagaagacgaccaacaagaatccccgctcgacggtgggcaccgtgaccgaaatcaacgacttcctgcgcctgctttacgcgcgggcgtcgcgggcctattcgcccgtgacgggcgaggagatggtccactataccgacgaccagatcgccgagctgattctcacgggcttcgccgggcgtaagatcgccctgatggcccccatcgtcaagggccgcaagggccactaccgcgaactgttcgagtcgctggccaagaaggggtacatctatgcgcgcatcgacggcgagatccgcgaaatatcgtcgggcatgcgcctcgaccgctacaagatacacaccatcgacctggtggtcgaccgcctcgtggtcagcgaggagtcccgcgaaaggctgatgacctcgctgaaggagtcgatgcgccagggcaagggcacgatggccgtccacgactacgggaccgggcagcagcgtttctactcgcgccacctgatgtgcccctcgacgggcgtggccttcgaggaccccgcgccgcacaccttctcgttcaactcgcccaagggcgcctgcccccattgcaacggactgggcgaggaggcggttttcgacgtggggaagatcattcccgatgcccgcttctcgctgcgcgaaggggccgtcggaccgctgggcaagtaccgcaacaacatgcttttcgccattctggagatgctgggccgccgttacgatttcacgctcgacgatcctgtcgaaagtttctccgaggaggcgctgaacgccgtgctctacggcgattccgagccgctgacggtcgacctgcaggagttctcgtcttcgggcggacgccagttcctctcgtgggagggcgtggccgagtacatcggccgcaccgaggacgacgattcgaagcacggccagaagtggcgcgaccagttcctcgtctaccgcaaatgttcggtctgcggcggttcgcgcctgcggaaggagtcgttgcagttccgcgtcgccgggaagaacatcgccgaggtgtcggccatgtcgatttccgagttctcggagtgggttcccaccatcgaaaaacagctctcggagaaggagtggaagattgcccaggagatcgtcaaggagatccgcgaacgcctgcggttcctgatggacgtggggctgggctacctctcgctggcgcgttcgtcgcgttcgctgtcgggcggcgagagccagcgcatccgcctcgccacgcagatcggctcgaaactcgtcaacgtgctctatatcctcgacgagccgtcgatcggcctgcaccagcgcgataaccagcggctgatccgcagcctcgaagagctgcgcgacgcgggcaactcggtgatcgtcgtcgagcacgacgaggacatgatgcgcgccgccgacttcatcgtcgacgtgggaccccgcgccgggcgcaagggcggcaacatcgtggccgccgggacgttcgacgacatcctccggtccgacaccatcaccgccgattacctgacgggacgccggcggatcgaaattcccgaaacgttgcgcaagggaacgggcgggcgcatcgtgatccgcggcgcgcggggcaacaacctcaagaacgtcacggcggaatttccgctgggcaagttcatctgcgtgacgggcgtcagcggctcgggcaagtcgacgctcgtcaacgagaccctgcggccgattctcgccagagagctttaccgctccttcgaccagccgctggagtacgacggggcggagggcctcgaacatatcgacaaactggtcgtcgtcgaccagtcgcccatcgggcgcactccgcggtcgaatcccgcgacctattcgaacgtcttttccgacatccgcaagctgttcgagatgacgcccgacgcccagatccgcggcttcaaggccgggcgtttctcgttcaacgtcaagggcggccgctgcgaggagtgccgcggggcgggcgtgcagaccatcgagatgaacttcctgcccgacgtctacgtgcgctgcaaggcgtgcggcggccaccgctacaaccgcgagacgctcgaagtgaagtacaagggcaaaaatatcgacgacgtgctgaacatgacggtcaacatggccgtggagtttttcgagaacatccccaatatctaccaaaaactccgggccattcaggaggtgggcctcggctacctgacgctcgggcagccctgcacgacgctgtcgggcggcgagagccagcgcatcaagctctcgtccgagctttcgaagcgcgacacgggccgcacgctctatatcctggacgagcctacgacggggcttcatttcgaggacatccgtctgctgctggaggtgctgaacaagctcgtcgaccgcggcaatacggtcatcgtcatcgaacacaacctcgacgtcatcaaggtcgccgaccatattatagatataggtcccgagggcggggcggccggcggggagatcatcgtcgcgggcacgccgcacgaggtggcgcagtgcgagggcagctacacgggtcagttcctcaaaaaactggggttgtagcgtctccgtctgtccggcggggcgctctgccgtgaggccctgaaactcgtcccgagggaggacggcgtatgcaaacgccgacgcccgtgacggtaacggtggtccggacgcggaaagtggcccatgatcccgctttcggcacaaaacttgctttcatagccgtaacaaaccttatgtgctatgaaaaaaacagtcattatcgttgtgggcctgctgctctgtgcggcggccgttaccgtgatcggacagaaaaaagtgctgtcgcccaaggaagaacgccgcgaggtgcgcgagaaacgccgtgcggaacgtatcgccaactacgagaagttcatggactcgctcgtgctgtcgcgcaacttccagttcaacccgacgaccttccagcgtcagcccgcaggtccgatgcgccagattatgaaccccgcgttcaacgtcggcatgtgggacggaacggcggacatcacgcttccctacatcaagggttacgtgccgccttactatgtgacgatcatcaactacaccgtttccgatttgcagggctatatcaccgagcagacgcacgaaggctggatggtgaccttctcgacctcgctgttctcggcgtcgacctacacgttcaccttcgaaatcttctcccgcacgggcggggctacgctgacgatcaccaatccgtggtataaccccgtgcagtatacgggttcgatttcgcagctctattgacgtaaattcattttgccggacccatcccgggcagccgtatccgctgcgctgtccgtttgccgctccggcgatccccgaacccccgcctcaagcgggggcttttttcccgttcaatccgatgtccgacttatgaaacactccgttttttccacctgcggcgcactctctttcattgcctgcgccgccgtcgcgcagaccccgcagtatacgctcgaaacttccgccgcggacagcgtgccgcagacgacgatcgttcccgtgcagcaggccccggtgcaggtcgtggagcatacgaccgtctacgaggagcctgcggcggggatggaccgcgcccagcgcagggcttataaggcccgggtctacgccgcgaagatcgactcgctggtgcagtcgcgcgactatatgttcttccccaactcgatgcagcagctgcccggcggaatgatccgttcgatctatgccgactacttctttttcggggtgttcgtcgaccatgtcgaggtgcacctgcctaccgaacggggcatcacccagtatgtcgagatgctgaatttcgattcgatgtcggtccgcgactaccgggcggcccgcgtgcagtggggctggtcggtctccttcaatatttcggacggcaacacgctctaccacgccgatttcgccgtctcgaccgccacgggcgaaacggtgctgacgctcctgacgcccgacgtcacgatgcgctacgtcggctggctgtggaacaagcgggtgaacgacccgcggtatcgcaggatggattagaaaatgaaggataaaacggcgccgaatcaattataggcaccgttttatctgaaattactcggtactcatggccagcctcaaacctacataatccgaattgtaagattgtgcaggcctgtgtgatacgcgtgcggaattggaccaaatagcccaacatccgccccgtataacgcgcatagacccgctttgcggaccttgtggatttgtttgaggttcctcgggataatcgcccagccagtcactgcaatattcgtaaagattaccgcccatgtcatacaatcccagttcattgggtaataactgttttacataatgcgggctgtttccattgttacgtaactcccaataatcccacttgttttcattgagtatataggttccggcattgttgtaacaccaggccgccaggatcgaaatgtcgaagcccggataaatgtgtccctgggatcggttgcctccccgtgctgcatattcccattcggcatcggtcggtaaccggaattttaatcccgttgcttggttgagacgttcgataaaaggttgaatgtcgttccactccacgccttgaggcttatggtattcagaatagtcgcactctgtttccataactgcgctccaaagttcctttgtgacctctgtttctccgatataaaaggtattgagcgtcactttatgtacaggatattcggtgcgatccggtttccagccgctcgcctcctgttcacgggttgctcccatctggaatgttcctccatctacttttaccatggtaaaagaacagttcttaaatgtaatttcttttaccggaacattctgttcgtttttcgaatgtccttcgtcatcatctttgctgcatgcgaccagacagatcgccaagaacggcagcagaatacggttttgtttcattttgatagattggttaagggttaagagtcaataaaaaacgcggacaaattcctttatccacgtcggaggtattggacgacctacaagtaagatgaaagaaatgcccgcgccgtaaaacagcacgagcatcgcctttagtcccttacttgttagaaagtgtccaattttccgacgtaagaagaaaagccgatgcactttttatatgtcgtgtgcccgcaggcacggagttgaaaggttgttttctactgcttcataggcgtcgcggtttggtgtttgatcgtacaaatataagcaattctgaattctgaattgtaaattctgaattatttcctgtccgcaggacggtaaataagcgccacggcggagacggagatgccttcctcgcgcccctcgaagcccagatgctccgtggtcgtggccttgaccgacacccggtcgtcgtctacgcccattgcgccggccatcgcacggcgcatggcgtcgatgtgcggccgcaacctgggctgctgggcgcggatcgtgcagtccacgttcccgatctcgtagcccttttcgcgcagcagttccgccacgcggcgcagcaggatcttcgagtcgatgcccgcaaaatcgaccgacgtgtcgggaaagtgcagcccgatgtcgcccagcgccgcggcgcccagcagagcgtcgcacagggcgtggatcgccacgtctccgtccgagtgggcgacgcaccctttcgtgtgggcgatctccacgcctcccagaaccagcggcaggccgtcggccagagcgtgtacgtcgtatccgtgtcctattctgaaatccattcgttcccgtattttatattgtcaaagttacggattttttcctaactttgcaaaaatgcaaaaatctatgtcggaaataacctctttggaaccgcgtcttgtctgggaacagttcgacgccatcacgcgtgtgccgcgtccttcgaagaaggagggcaaaatcattgattttctggtcgatttcgccaaaaagcaccatatcgaatataaaaaggacgccatcggcaacgtcgtgatgcgcaagcccgccacgccgggcatggaggagcgcgcagccgtgatcctccagtcgcacatggacatggtctgcgaaaagaactccgatgtggagttcgacttcgacaacgatcccatccgcacgcgtatcgacggcgagtgggtccgggccgaaggtacgacgctgggcgccgactgcggtatcggcatggccgccgcgctggccgtgatgctcgacgagacggtggagcacggtcccgtcgaggcgctgttcaccgtcgacgaggagacgggcctcacgggtgcgttcgagttgggcgaggggatgctcacgggcaaatacctcgtcaacctcgattcggaggacgagggcgaaatcttcatcggctgtgcgggcggcatcgacaccatcgccacgttccactacacgatggagccgtcgccgaagaactacacgttcttccgtgtcgacgtgtcggaccttcagggcggacactcgggcgacgacatcgacaagggccgcgtcaactcgaacaagaccgtggcgcgcctgctgtgggacggcatgcagtcgttcgaactcaaactgtgctatttcaacggcggcaacctccgcaatgccattccccgcgaggcttacgccatcttcggcgttccggtccgcttcaaggaggagttcgtcaagcgttacaaccttttcgccgcggacctcgaagccgaattccgcttccgcgaacccaatttcaaaatcacgctcaacgagatgccccacgtcgacgaggtgctcgacagcaggacgcagtcggcgctggtctactcgttggtgggcgttcccaacggggtcgtggccatgtcgttcgccgttccggggctggtcgagacctcgacgaacctcgcttcggtgaagttcgcggagggcaaccgcatcgtcgtcacctcgtcgcagcggtcgtcggtcgagagcgccaagacctacgtgatgcagatggtcgagtcggtctttgcgctggcgggcgccgatgtggcccattccgacggctatccgggctggatgcccgacccgcagtcgaagctgctggaggtcaccgtcgatgcttacaaacggctgttcggctccgaacccaaggtccgcgccatccatgccgggctggagtgcggtctgttcctcgaaaagtatcccgatctggagatggtctccttcggtccgacgctccgcggcgtgcattcgcccgacgaacggctcgaaatcgccacggttcccaagttctggaaactgctgaccgaagtcctgaaaacaatctgattccgattccggcgtccccgctgcggggacgccggaatttgtcatgccccatccccgtctgacgctgctcctgccgtgtcgcgacggcttttctgtttgccggaccgttttgccgcgctgcatgcgatccggttttgaatcgtcggactttttgctatctttgtgttctgtaaagtcgcaaagatatgctgaaaagctgttgtgccctgttgtttctcctgtttccgtgtgcggcggcggcccagtaccccggcgacgaatactatccctatgccgaacgcgaggagcggcgcgaactgctcacgaccgattcgacgctcttctaccgcgccgtgcagtccccttcggacctctacggccttcgcaccggtttcaacctgccgcaggtcgcgctccggcgtcgcggactggattacaccctggaacgcacgtcgctcatgggcgttgcggtttcctaccgttacctcgcggcgctgcgcctgctcggggccgaagaacagcgctatgcggggcttgccgccgcgcccggggaaccggctgcggcgggcggcatgcgggcgttccggttttcggatggggagccgttgcagccctttctggcttcggtccgcttcaccgaccgcaattacctcgtgggagcgaaagccgccgtctcggcgtcgccgggcgacggctggcgcatttcggcggctctcgacgcccgctccggccgcgacatgcacgtcgaaggggtcttcaccaatgccgtgaccgccggactgcgccttgcccggcgtttcggcgaagggcacgaactctccgtgctgtgtatcgtgccgccctcggtgcggggcacgcgcctctcctcttcggaggaggctttcacgctcacgggcgaccgtctctacaacccggcgtggggctggcaggacggcagggtgcgcaactcccgcgtgcggcgcgagacggttccgctggccctggccgcctatgccgtgccgctgtcggcttcgacctcgttcgccgccacgcttgccgccgaggcgggcgtcgcgaagtacagcatgctcgactggtacgacgcccgcacgccgatgcccgacaattaccggtatctgcccagctatacgggcgaccgggagaccgagcaggcgtggctcgcccgcgatccgcgctacacgcagatcgactgggacgagctgatccgccagaaccgcatggcgggcggacatgcggtctatgcgttggaagaccgtgtcgaacggctctgcaacctcgctttcgacgcgtcgttcgccaccgaagccgacgcccggctgacgctccgctacggagtttcgctccgccgcgaaaacacccgttcctacaagcagatgcgcgatctgctgggcgccgggtacgttacggacatcgaccgcttcctgatcgacgacgatacgtacagcaatctgttgcagaatgacctgcggcatcccggacggacggtccgcgagggcgaccgcttcggctacgattatgcgctgacgctgcgcggggctgcgctccacttgcaggccgattaccgctccgaccgtttccgggccgatctttcggtcgtgctggggagcgatgccgtcagccgccggggctattacgagaaggaactttttcccggcgggcagtcctacggcccttcgcgcgtcatgcggttcacgccctacacgctcaaggccgcggcgggctgggccttcaccccgcgccgctatatcgaaatcgccgccgcggccgccgcccggacccctcgggccggggatcttttctttcagccgctctataacaaccgtacggtcgacaaccccgtgcccgaacgtatctacgccgccgaactcaactgccgcctgacgggatccgtcgtcgattttcaggcggcgttcttcgctgccatgacgctcgacggcatcgagacgcggacgtattacgacgacatggcctcggtctactgcgacatggccgtgacgggcgtcgggcgcatgtcctgcggcgcggaggccgcggccgacatccggctgtcctaccgctggctgctgtcgctggccgcttcggccggacgctacgaatacattcgtgatccgcgcgtcacggtgctctccgacgtggataactcggccgtcgacgtgcaggccgtgagccgtatgggcggctgcgagacgggcggcgccccgcagctgaccgctctggcggagatcgcctggttcggcccgaaagggtggggatgccgcgcttcggcaggatatgccgggcggcgttacgtcgaaccgatgcccctgcgccgcaccgaccgcatcgcgggtcagggcggtatcacacgggagtttttcgacgccttcacccggcaggagcggctgccggacgccttcacgctcgatgccgcgctgttcaagtcgttccggttcgaacgttcgcggctcaccgcgtcgctgatgctgcgcaacctgacgggcgaagccgatacggtctatggcggctacgagtcgctgcgcgtgcgccgcatccgcccgggcgacgacacgctctacgcgccccacgcctcgcgctgcacctatgcgtggccccgttcgttctatcttacaatctcttaccggttttgatccgcacgtaaaaaaacgtccggattttttggatttccgcgttaaattcgtattttggagaggcaaaaaccttaaaaacttccagatccatgattatcggtattccaaaagagatcaagaacaacgagaatcgcgttgctcttacccccgcaggcgcccgggagcttgtcaaacggggacacaaagtttatgtgcaggctacggccggtgtgaacagcggatttgccgatgatgcctacacggccgtcggggcggagatgcttccctcgatcgaggaggtctacgcccgggcggaaatgatcgtcaaggtcaaggaaccggtggctcccgagtacaaactcatccgcagggaccagctggttttcaccttcttccacttcgccagcagcgaacccctcacccgtgcgatggtcgacagcggggcggtctgctgtgcctatgagaccgtcgagcgcgccgaccgttcgctgccgctgctgatcccgatgtcggaggtcgcggggcgcatggccgcgcaggagggacgctatttcctcgaaaaaccccgcggcggcaagggtgtgctgctgggcggcgtgccgggcgtgaagcccgccaaggtcttcgtcatcggtgcgggcgttgtcggaacggctgcggcgcgcaccgctgccggaacgggggccgacgtgacgatctgcgacatttcgctccagcggctgacctatctggccgacgtgatgccccgcaacgtcaagacgctgatgtcttccgaatacaacatccgcgaggagctgaagcatgccgacctggtggtcggctcggtgctgattccgggagccaaggccccgaagctcgtcacgcgcgacatgctccgggagatggagccgggaacggtgatggtcgacgtggccatcgaccagggcggctgtttcgagacttcgcgccccaccacgcacgaggacccggtctatcacgtcgacggcatcctgcactactgcgtggccaacattccgggcgccgtgccccgcacctcgaccctcgcgcttacgaacgcgacgcttccctacaccatccagcttgccgacaagggctggcggcgcgccgcacaggagaatcccgagctggcgctggggctgaacatcatcggcggcagggtggtctgcaaacccgtggccgatgcctgggggctgccttacgaaccgttggcgctgtaacctgccgggacggtaatccgcaggcgttgtaacctgccggcctgttttgcggcggccttcctgtccatccgggacggggaggccgccggtgtgtaattatccgacttttgggacgatttgtttttgaaattattaaataattcatatatttgcaagagagcaaggcagttacgtcggtcattccggtttcattccggttggaatgcgtcgctaaaagcgtcgaatcttcaagtccggcggctgtttttgttacggatcgtaagcaatacagaaagtcagggtggcgtttgccgcacggaaagcgtggggcggcgtcattaagttttattcgataaagaggttagtatgagtgagagattgtacattttcgacaccacgctgcgcgacggtgagcaggtccccggttgtcagttgaacaccaccgaaaaaattgaagtcgccaaactgctcgaaagcctcggcgtagacgtcatcgaggcgggatttcccatctccagccccggtgatttcaactccgtgctggagatttccaaggccgtttccgagccgacgatctgcgcgctgacccgcgccgtgaagaaggacatcgacgttgcggccgatgcgctgcggctggccaggcgcaagcgtatccatacgggcatcggcgtttcgccgcagcatatctacgacaaactgcgttccacgcccgagaagatcgtcgaatctgccgtcgaggcggtgaaatatgccaaacgctacgtcgaggacgtggagttctatgccgaggacgccgggcgtgccgacgtcgagtacctcgcccgcgtggtcgaggcggtcatccgggccggcgcgacggtggtcaatatccccgacacgacgggctactgtcttccgaacgaatacggcgcgaagatcaaatacctcgtggacaacgttcccaacatcgaccgggcgatcatttcgacccactgccacaacgatctgggcatggctacggccaatacgctgagcggcatcctgaacggcgcacggcaggccgaggtcacgatcaacggcatcggcgaacgggccggcaacacctcgctcgaagaggtggtgatgacgctccgctgccacaaggacgtggccgtcgacacgaacatcaattcgcgcctgatcaccaaggcctcgcacctggtgtcgagcctgatgaacatgcccgtgcagcccaacaaggccatcgtgggccgcaacgccttcgcccattcgtcgggcatccatcaggacggcgtgctcaagcagcgtcagacctacgagatcatcgacccgcaggacatcgggctgaacgagtcggtcatcgccctcacggcccgcagcgggcgcgcggccctcgtgcaccggctcgaactgctgggctacgaccttacgcaggaggaattggacgccacgtacgagaaattcctcgccctggccgaccggaagaaggagattcacgactacgacctgttgtacctcgtgggcgacatcgaccgcatgaagcagcagtccatttcgttgaaattcatgcaggtgaccaccgggacgctggttccgacggctaccgtggtgctgaaattcggcgaccacgaacgcatgtccaccgccacgggcaacggtccggtcgacgcggcggtctcggccatcaagaaactgatcaacgagaaggtggtgcttgcggagttcctgatgcaggccatcacgcgcggttcgaacgacgtgggccgcgtgcatgtgcaggtcgagtgcggcagccgcacggtccacggattcggcgcgcacaccgacaccacgcgggcttcgatcgaggcgttcctcgacgcgctgcgcgcactcaacgtaaccgaaaaaatcgaggaggaggattgatatgggacgaacgcttctggacaagatatgggacgcgcacacggtgcgtgtcgaggacggcggccgctgcgtgctctacatcgaccggcagtatatccacgaggtgacgtcgcccgtggctttcgcggggatcgaacgccgcggcttcggcgtcgcgcgtccggcgcagatcacggccacggctgaccataacatcccgaccgtcgaccagcaccttccgatcggggagccggagtcgcggcggcaggtcgagacgctggccgagaactgcgcccgccacggcatcgagcacttcggcgtgggacaccccaggcagggcatcgtgcacatcatcggccccgagctgggattcacccagccgggcatgacgatcgtctgcggcgacagccacacttcgacccacggagctttgggcgccgtggcgttcggcgtggggacttcggaggtcgaaatggtcttcgccagccagtgcatcctccagaccaaaccccgcacgatgcgcattacggtcgacggcgcgctgcgtccgggcgtcgaggccaaggatgtcatcctctatatcatctcgaaactcaccgcttcgggcggcacgggccatttcatcgagtttgccggcagcacgatccgttcgctctcgatggagggccgcatgacggtctgcaacatgagcatcgagtgcggcgcgcgcggcggcatgatcgcccccgacgagaagaccttcgaatacctccggggccgcgaacgcgctccgcagggagccgcctacgacgaggctgtggcccgctggcgggaactttacagcgatgcggacgcggttttcgacagggagtaccgcttcgacgccgcggacatcgccccgatgatcacctacggaaccaatcccggaatggggatggccgtcgacggaacgattcccgccgacgccgatcccaaggcgttggagtacatgggtttcagacccggggagcggatgttgggcaaagcggtcgactacgtgttcgtcggcagttgcaccaacggccgcatcgaggacctgcgccgcttcgcccgtctggtcgaaggccgccgcaaggcggacaacatcaccgcatggatcgttcccggttcgaagggcgtcgaagccgccgcgcgggccgagggactggaccgcatcctcgccgcagcgggtttcgaactccgccagccgggctgttcggcgtgcctggcgatgaacgccgacaagattccggcgggcaaatacagcgtttcgacctcgaaccgcaatttcgagggccggcagggtcccggcgcccgtacgatgctgtcgggtgtggccgttgccgccgccgccgcggtgacgggcgtgatttccgatccgcgcgaagtgttcgatatgtaaaagattatcattatgtccatacccaaattcgtaaccttcacctcgggggccgttcccgtcgaggtggaaaacatagataccgaccagatcatcccggcgcgctttctgaaagccactgaacgcaagggcttcggcgacaaccttttccgcgactggcgctacgacgccgcggaacagcggatcgcttcgttccctttgaacgatccccgctacgaggggcgaatcctcgtcgccgggcgcaatttcggctgcggaagttcgcgcgagcatgccgcctgggccatcgccgactacggtttccgcgtcgtggtgtcgagcttcttcgccgacatcttccgcaacaacgccctgaacaacggcctgctgccgatccgtgtgagcgaggagtttctgaaagccgttttcggcgagatccggcgcgacccgaaggcgcagttcaccgtcgatctgggcaaccagacgctgaccatcgtgtcggacgggcgcagcgagggtttcgagatcgacgcctacaagaaacgctgtctcgaaaacggctacgacgacgtggactacctgcgcagtatcgccgaccggatcgaggccttcgaagccgcccgcaaatagcctgcaccgatgtttcccccggttgaaatcatggacaccacgctgcgcgacggcgagcagacctcgggcgtctccttcaacgcccgtgaaaaactctccatcgcccggctgttgctggaggaactgcacgtaagccgcatcgagatcgcctcggcgcgggtctcgcagggcgaacagcaggccgtgcgcgccatcgccgaatgggctgccgccaagggctatgccgaccgtgtggaagcgctgggattcatcgacggcggggtgtcgctcgactggctcgggaccgccggatgccgcgtggtcaacctgctggccaaaggttcgcggaaacattgcgaggggcagctgcgccgcacgcccgaacggcatctggaggatgtgcgtgccgagatccttgcggccgtcgaccgcgggatgaaggtgaacctctaccttgaggattggtccaacggcatgcgccgttcgcccgactacgtctacgcgatgctcgacggactggccgacgctcccgtcagccggttcatgtgccccgatacgctgggcgtcctcgacccctacgacaccgaacgtttctgccgcgacctggtggagcgttatccgtcgctgcgtttcgatttccacgcccacaacgactacgacctcgccgtggccaacaccgccgccgccgtgcgtgcgggtttccacggcgttcacgtcaccgtgaacgggctgggtgagcgggccggcaacgcgccgctgtcgagcgcggtggccgtgctgcacgaccgcctgggccgcacgacggggatcgacgaaacgaagatcaaccgcgtcagccgcacggtcgagagctatacgggcatccgcattcccgccaaccgaccgatcgtcggcgcgagcgtcttcacgcagtgcgcgggcatccacgccgacggtgacagcaagaacaacctctacttcaacgaactgcttcccgagcgtttcgggcgcgtccgcgaatacgccctgggcaaaacctcgggcaaggccaatgtcttgaaaaacctcgaagcgctgggcatcgacctcgacgaggccgcgatgcgcaaggtgaccgaacgggtggtcgagttgagcgacaagaaggagcaggtgacggccgaggacctgccgtatatcatcgccgacgtgctgcgctacgacccggtcgacaccccggtccggattctcaattacagcctctcgctggcgcaggggatgcaccccgtcgcgacgctccggatcgagattcacggctgcgcgtacgagcggacctcggcgggcgacggccagtacgacgccttcatgcgtgccctgcggcaaatctaccgcgaacagctcgggcgcgagtttccgatgctgcgcgactataccgtttcgattccgcccggaggccgcaccgacgctttcgtgcagacgatcatcacctgggagatggacggccgcgaattcaagacccgcgggctggacgccgaccagacggaggctgccatcaaggcgactgtcaaaatgttgaatgtcattgaaataaactataacgacaatggatgttaaaatcgctcttttagccggcgacggcatcggtcccgagatcgtcgccgaagccacgaaagtgttggaccgcgtggcggaaaaattcggacacaagatcgaataccatcccgcattggtgggcgccgcggccatcgacgctgtgggcgacccctatcccgacgagacgcacgccgtctgtcttgcggcggacgccgtgctgttcggagccatcggggaccccaaatatgacaacgaccccacggcgaaggtgcggcccgagcaggggctgctgcggatgcgcaagtcgctggggctgttcgccaacctgcgccccgtggcgctgttcgacgccctggccgaccgttcgccgctcaaggcggaggtggtccgcggcacggatttcatctgcgtgcgcgaactcacgggcggcatctacttcggccgtccgcagggccgcgacgaggagggcgcgcgcgccttcgacacctgcacctacacggtctcggagatcgaacgggtcctgcacgtggcgttccggctggccgtgtcgcgccgccgcaaactgacggtcgtcgacaaggccaacgtgctggaaacctcgcgtctgtggcgtgaaacggcccagcgggtagcccgggagtatcccgaggtggcggtggactatatgttcgtggacaacgccgccatgcagatcatccgccaaccggcttatttcgatgtcatcgtcaccgaaaacatgttcggcgacatcctcaccgacgaggccagcgtcatcagcggttcgctgggcatgctctcctcggcgagcgtgggggccgaagtggcccttttcgagccgatccacggctcctatccgcaggccgcgggaaagaacatcgccaacccgatggccacgattctttcggccgcgatgcttctggagcacctgggtctcgatgccgagggcagggctgtgcggcgtgccgtcgatcgggcgctggccgaaggcgtcgtcaccgaggaccttgcagcgccgggcgaaaatgcccgttcgacctccgaggtgggggattacgtcgcttcgcagatttaatcccgttattccgaattgccggcagaccgttttttcgcggtctgccttttttgggtgtcgtaacgacacttttatttttgttgcggcgttttaccgaactgcatgcgaatcaattttgttctcgtccgacttttatgtacctttgtcgcttcaagaacaatgaatgacatggcaggttccaatttcgtagattacgtaaagatattcgcccgctcggggcacggcggcggcggctcgacgcattttcgccgcgagaaattcgtggctttcggcggtcccgacggcggtgacggcggcaagggcgggagcatcgtcctgcaaggcgacaagcagtactggacgctcatccacctcaaataccagcgtcaccagttcgccgaggacggcgagcacggctccggggcgcgctcctcgggcaaggacgcccgcgacatcgtgatcccggttccgctgggcacggtcgccaagcgcgttttcgagaacgaggacgggactgcgaccaccgaaacggtgggcgaggtgacggccgacggcgagcggctcgtgctgctccggggcggtcggggcggtctgggcaactggcatttcaagagcgccaccaaccagacgccgcgctacgcccagccgggcgaggagggtgaggaaggcacgttcatcctcgaactgaaagtgctggccgacgtggggctggtgggcttccccaatgcgggcaagtctacgctgctctcggtcgtttcggccgcgaagcccaagatcgccgactacgccttcacgacgctggagccgaatctcggtatcgtcgaggtccgcgaccacaagtcgttcgtcatggccgacattccgggcatcatcgagggtgcgcacgagggccgcggtctcggaacccgtttcctgcgccatatcgagcgcaattcggtgctgttgttcctgattcccgccgacagcgacgacatccgccgcgactacgacgtcctgctgggcgaactgacgcagtacaatcccgaactgctggacaaggagcgtctgctggccgtcaccaagtgcgacatgctcgacgaggacctgatcgccgagatgcgcggccacctgcccgaaggcgtgccgtcggtcttcatctcgtcggtctcggggctgaacatcccgcggctcaaggatatgctgtgggaggcgttgcagcggtaacccccgcccgcgttgtccgcgttgtccgcgccggacgtccggcggttgggcgtgttgctgcggaatgcgctgccgtgccggaaaactccgcttcgcggttggtgacgcgcagggtgtatttcccggcgaaatagtcgatgattccatacaaggagcctgtgccctggggcagaggctcctttgcgtagacgcaggtcgcggcggtccgcacggtgaaggtccggccccgggtgtcgacgatctcgcgctcggtggcgacggcgcggcccgtctccgggtcggtgtcgcaccaggttttcccggcgtcggcgaaacgcacgtcgtcgaaacggacgcgtgtgtcgatgtgccgggccgagacggcgtcgaacgtaaggagctgtgcggagggtgtctcgccgccgggcggttcggtgcggatgtaccgcgccagctcttcgcgcggaatgcaccctgcgccgccgtcgccgggtgtcgttcccagctggattttcccgccgtagtcgcacagcgtaaggccgttgcagcgtacggtcgccacgatgccgaacggatagaggtctgccagcggggagccttccgcggcgatcgagatgccgcccgaggcgtcttcgacgacgatcgtcctgtgaaattcgccgtagaggtcattggccgtgacgaatccgcggatggtgacgtcctgcgctatcgcgacgctgctcttcccgtcgcagagcgatttgaggtaggcgaccgaattctgcggctccggaggacggaccgtgaattcgggctgcgtggcccggtcgcatccggccggcagcgtcagcaggaccggcagcgtcagcaggctaatgcgtgcagtcgttctcatcgcgcagtttgaggatgtaacgcccgtcgcccgcggtgtcgtactggagaatgcccgtcagcgagaccgtgccggcaggcacttcggcgtcggcgaaacgggcgtatcggcggacgtaggtgtagacggcgttgccgtcggcgtcggtgaagcgtttgtagcccgcccaggttgccgccgaaaggtcttcgggggtgtagcgcacgccgtcgatgcggacgagcgtgccgcagcggctttccgtaagcgcgggaatggcaagcggggcaggggagggcgcagccagggcttcgccgctgcggatcagcacggcgccgagcgccgcccgggagccgatgtagtccgttgcgtagccgcttccggcggcgggcggacgtcccgcctgcaacaccccgcggctttcggcgacggcaagtccccggagcgaaagcgttacgcggcttcctgtggggaagtcgttgtgcaggtggtcgataccggccatcacttcaagtcccgcttcagcgtcgcagatgcagagcgtgcggtagaaattctccgcgcggtcgcaactcgcgaccctccccgtgacgacgatgtcgcccgtaacggtgaagggcgtgcccgcatagcggtcgcgcagcgcggcgatggtctccgtcgcgggtttcccctcgccgtcgtcgtccggttccccgaaccgggagtcgtagcacccggtcagcaggagcgcggcgacggcgccgaaaagaggtatgggacggaagtgaagcatatttttacgcaatgcggtgattcatacggaccccggccggtttgccgttaagcccttccccgggagaggggcggaccggtgaacgacgccggaggcggcgataacgaccggaccgaagcgggatgcggcgtgtcgcgcggaagcgtatccggcaatgttattgttcgatacgcgaatctttcagtcccaggaagtagaggatgccgtccagcccgatggtcgagatcgactgtcgggccgtggcctttaccttgggtttggcgtggaaggcgatgcccaggcccgcgaggttgagcatcggcaggtcgttggcgccgtcgccgacggccaccgactgggcgatgttgatctcctcgaactggcacagcagccgcagcagttcggccttgcggcgtccgtcgaccacctcgccgacatagcgtcccgtgaggcgtccgtcctcgatctccagttcgttggcgtagacatagtcgaagccgtatttctgccggaggtagttgccgaaataggtgaatccgccggagaggatcgccgttttgtaacccacgcgtttgagaatggtcatcatgcgctccagcccctcggtgatcggcaggctgcgggcgatctcctccatgaccgagacgtccagtcccttgagcagcgcgaccctctgcgaaaagctttcgcggaaatcaatctcgccgcgcatggcgctggccgtgatttcgcgcactttgtcgcccacgcccgcgcgctcggccagttcgtcgatcacctcggtctcgatcagcgtcgagtccatgtcgaagcagatcaggcggcggctgcggcggtagatgtcgtccttctggaacgagacgtcgagaccgatctccgagaggttcataaatccctcctgcatcgtgctgcgttcctggtcggtgagcgatccgcgcaccgagagttcgatgcacgacttggcggcgcggtcgtcctcgcagaggggcatgcggcccgtgaggcgtttgatggcgtcgatgttcagcccgtgctcggccacgaccttcgtcacctcggcgatgtggcgtgccgtgacggtgcggcccagcagggtgatgatgtagcggtttttgccctgacggcccacccagtcgttgtagcgttcctcggagatgggcgtgaaacggatcatcacgcccagttccgacgccttgaacaacagctccttcatgatgcttcccgacttgtcggccgtggtcttgatcaggatgccgagcgtcagcgactggtggatgttggcctgtccgatgtcgaggatgaaggcgtcgtagcgtgcgaggatctcggtgagcgacgaggtcatgcccggtttgtcttcacccgaaatgttgatctggataatttcaacgttgttctgcatcgtataatgtatggtgttttccggcgctttctgcaaaaagcgcagacaaagttaataaagttctcttttttttggctatttttgcctcacaaacttaaaaaacggaattatgtggacatttttagcggccgaagaacctgcctcgctgatcgtgccggacagtgtgcagaaagcgaatctggccgaagcggtcaataagatcgtgaacatggatttcagcactttgttcggctcgctgattcgtgaatcgctctggattcttgtcaaggttctcattgcgctggccatctatttcatcggacgctggctcgtgcgccgcttcctgcggctgatcgacgtggccatgcagcaccgcaatgtcgacatttcgctgcgttcgttcacgcgtaataccgtcagcgcgttcttcacgctgctgctcatcctgatcgtcgtgtcgacgctgggcgtcaacgtgacatcgctcatcgccgtcgcgtcggccgccacgctggccatcggtatggctttgagcggcacggcccagaactttgccggcggggtgatgatcctgctgatgaaaccctaccgcatcggcgactacatctcggcgcagggacagtcgggaaccgtgcgcgacatcaagctcttctcgacggtgatcgccacggccgacaaccagacgatctacattcccaacaactcgatcgcgacggccatcatcgacaactattccacctccgagacgcgccgcgtggactggaccgtgggcatctcctacggcgacgacgtggatgtggcccgcaaggccgtcctttcgatgctggccgccgatccgcgcgtcctgtccgatcccgccccggtggtgtgggtcgctgcgctggccgacagttcggtgaacctctcgatccgcgcatgggtgaagaacgctgactactggaacgtctttttcgagcataacgagcagttctacaaggagctgccgaaggccggcatcaacttcccgttcccgcagatggacgtgcacctgaccaaagagtagggtatgaaaacgcgccttttcaccgttcttgcggcaatgagcctttcggcctgcaatcctgaccggggacccgagtatacgaccccggcggaattcggcgaggtgaccgtgtcgccgcagaccatggccttcgattcggaggtcagggtgaaggtgtccgtttcgtgcccctacgggctgcgcaacgtctgcattctctacatgctcgacggcgacgaatccgacgtgaggaccgtcgcgaagaccgagccgccagccgacgtcacctcgttcgattacgagggagtcattccccggcagagagccggccggaaagtgactttccggatacgtgccatcacggcatacaatgtgccctcctatacgcagctccgggaatatacggttcccgacgaagaggaggaagaatccgaacaacccatttaaacaacgaaatagcaattttatggaactgaaagagattctggccatttcgggccagcccggactttataaattcgtggcgcagtccgtgcgcggcgtgatcgtcgagtcgctgctcgacggacggcgcatgaatgcctcggcgaatgccaaggtgagcgccctttcggagatttcgatgttcaccgaaggcgaggacattgcgctggccgacgttttcacccggatctacgcccacacgggcggcaaggaggcgatcagccccaaggagtcgcccgagaagctgaaagccgcgtttgccgaggtgcttcccgagtacgaccgcgaccgggtgcatgtttcggacatcaagaagtgtttcgcgtggtacaacacgctggtcggggcgggattcacggagttcaaacttccggccgagaacgaatagcgaaaaatatcccggcccgtgccgggacgaaccgaaagccgctgcggctttcataaagacctgtcgttatggagaggaaaacgaaagtgctggcactggttgcccacgacaacatgaaacgcgacctggcggagtgggtcgactggaacagccgcaagttgagccgccaccatttggtatgtacgggtacgaccggcaagatggtcgaaaagaccctgcgcgaccaccgggaggagcacgaggacgagacggaggagaaacccgagctgaaaatcacgctgctcaagtcgggtccgctgggcggcgaccaacagctggggtcgctcatcgccgacggaaagatcaatgcgctgattttcttctgggacccgatgtcggcccagccgcacgacgtcgacgtgaaggcgctgctgcgtctggcgacgctttacaacgtcccgacggccatcaaccgttcgtcggccgatttcctgatctcctcgccactgtacgaggacgacggctacgaacccgtcgtgaaggattacaaggcctatgtcgagcgggtgctgaaataggcgatggattgaaaagggaacgggcgtgaatttcacgcccgttccctttttcgttattaagtgtacgcagaggtcgtttttgcaggaatccggagcgtttactccatgtccagcggcatggattcgatgaccgctttgttggcggccttgagccgttcgggaagcaccttcatcaccttgcggtcgtaggtgaatagaccgttcacttcgccctccacgtcggtggtctgggtgtagacggcgcccgagaagcccagacgcacgtatttgatcaggcttttggcgtatttctcatactctgccgtcacctcctccggggtcttgaactgcacgtagccccagttgcgcttgttccaccagaggtgtccctccatgggcagcccgatgccgccgtattcgcccagcacgttcacgcgctgcggatcgaagagtttcatggcgggacccgggtagttgtgcaggtcgagcatgtggccgcagggacggtggttgccgccgctggcggggttgaccagacgcgagggatcgtactccatggtccagttcacgatgcgctcggtgtcgaactggccccatgcctcgttgaagggaacccataccacgacgctcggggaagacatgcataaatccatgatctccttccactctttgctgaagttgtccttcgactcctgcgtgcggttcttgtccgtaccgccgttgtaggtgtgcatttcccacttgttgcccatgtctcccgagggcatgtcctgccatacgaggatgccttcgcggtcgcagtggtagtaccagcgcgccggctcgaccttcacgtgcttgcggatcatgttgtagcccagctccttggtcttcagaatgtcgaacagcagcgcttcgtcggtcggtgcggtgaaaagtccgtcgggccaccagccttggtcgagcgggccgtagtggaagagcggtttgtcgttgagcgtcatgcggaggatgccgcccttgtcgcgcttggttccgatcttgcgcatggcggtgtacgaatcgaccttgtcgacggttttcccgccctgcctgagcgacacttccatgtcgtagaggaacggcgagtcggggctccagagtttcggctcggcgatgcccagacgcagcgggcttccgggaagtcccgtcgccgaagccacgagcttgcccttgtcgaggatcttcacctccaccagatcgcccgtcgtgcagttttcggccgccacggttacggctatgttcttctggtccaggttgggaatggccttgatacccgagatgtggctcttcgccaccggttcgatccacacggtctgccagatgccgctgaccggcgtgtaccagatgccgttggggttcagcacctgctttccgcggggctgatatcccttgtccgtgccgtcgaacacgcgtacgaccagcttctgctcacctttggccttgagatagggggtgatgtcgagcgaaaagggcgtgaagccgcccgtgtgcgagcctgcaaggatgtcgttcacgaatacgtcggctttccagtccaccgcgccgaagttcagcagcacgttgctgcctttccaggcggcgggcacgctgaacgtgcggcggtaccagagttcatccttctcggtgaggcccttctgcacgcccgacagcgaggattcgacagcgaaggggacgaggatctttccgtccatcgttttcggttccatggcgccgacgggtttgatggcatagtcccacaggccgttgagattcacccactgcgagcgtaccatctgcggacgcgggtattcgggaagcacgttggccgggtcgaccttttcggcccatggcgtcttgattttgtcgcccacgggtttccactgggcaaaggtgcacagcatgctcagcgctgccacggttgtcagaattgtttttttcattactgattgataaaaggattgaatatagtgtttactgtctcttcttcttgaactgtccggggtaaggctctaccatgcagcgctttgcccaggcttcatacgctttggccatcgcttcgacctttgcgggggcctgctccggattttcgagcacgtatatctgatggttgcccgtattgccgtcgtcgtcgctcaaatagatataccatcaggttcgcgatccggcgcagcgacatggcgtttacgggagctttcatggttgggttggttttaaaatcctgatttacgaatacaaatttcgtaaattaaaattttttacctgccatattttgatcagaaaaaagcaagatttagtcaaaatgccccgcaggggtccggttggcgaaaaattgtcgtcgattggtcaaatattggtgccccggaacggctgatgtatttatatttgtatgccaatcgaaatcgtgcattattttatgctattcttcaaacgcccggctttcggccgaatctacgccttcgaggtggacggctacgggaaccgcaccggcctgctcaacagcattacggtcgagtagggaccggtatgattccgatgaaaaagcggggccgcacacattgcggccccgctttttcacaggttgtgcgacagcggtgccggaaccgcttcgctcaaatcgtagccgccccagcggcaggcgatctcgtcgagcgtggcgaacagctcggcggtgtcgagcgatgtcacgagtttcagccgtgtggacttgaagtcgggcagccccttgaaatagttggtcatgtgacgccgcatttcgaggattccgacatggtcacccttgatttcgagcgatttctgtaaatgttccttcgcgatggccacgcgttccgcgaccgacggctgcggcagcgcttcgcccgtcgagaggtagtgcttcacttcgcggaatatccacggccggccgtaggtcgcccggccgatcatcacgccgtccacgccgtagcggtcgaacatctcgcgggctttcggacctgaatcgacgtcgccgttgccgatgatcggaatgcgtatctgcggattgttcttcaccttgccgatcagcgtccagtcggcctcgccgcggtacatctgcgcccgcgtgcgcccgtgaatggtgagggccgcaatgccgacatcctgcaaccgcagggctatctcttcgatgtttttcgactcctcgtcccatccgaggcgggttttcaccgtcacgggcttcttcaccgccgcgacgatccggcgcgtcatctcgaccatcagcggcacgtcgcgcatcatccccgacccggctccgcggccggcgatcttcttcaccgggcagccgaaattgatgtcgatcacgtcgggaccggccgcctcggccatgcgcgccgcctcgaccatcgggtcgatcaggtggccgtatatctgaatgcccacggggcgttccgcgtcgtcgatttcgagtttcttgagcgatttcgccgcgtcgcggatcagcccgtccgacgagatgaactcggtgtagaccatgtcggcgccgaagcgtttgcacatgtagcggaacgacgggtcggtcacgtcctccatcggagcgagcagcagggcgcgttcgcccagttctatatttgctattttcatggctgttgtttctggctgacgaggattttgtcgatgcgcgcgccgtccatgtccacgatttcgaacgtgaagccgttccattccagtttctcgcccgtggcgggaatgtgggccagttggtcgaggatcaggccgctgacggtgttgtaggcgttgcagggcagggcgttttccagaccgaaccagtcgagaaagtcgtagaaagggcattgcccgtcgaccagacagctgccgtcttcgcgccggacgatgtccggttcctcgcgcgggtcgggcagttcgccgaccagggcttcgaaaatgtcgcgcagggtgatgatgccgcgcgtcacgccgaattcgtcgcagatgatgccgtagcccagctgttccgtgcgcagctgttcgagggcgttgtagacctcgaacccttcgtggaagaatttcgccggagcgaccagcctgcgcaggtcgaatccctcgtcgcccaggtgcaggaagaggtctttgaggcagaccacgcccagcagtttgtcgagacttccctcgccgacggggtagcggttgtggggcgctcgggccaccgtctcgcggatctgagctgcggacgccgccgcgtcgatccatgccagttcgctgcggtgggtcatgatcgactccacggtgcggtcgcccagcgagaagacgcggcccatgatctgctgttcgaccgcctgcacctcgccgtcctcggcgccttcctggatgatcgaacggatttccgcctcggtgaccttgctctcggcccgttgcaggcccagcaggcgggcgacgcccgccgtgcttctggagagcagccacacgaagggcgacgccgcgaccgaaagcagccgcatcggccgcgcgacgatttttgcggcccgctcggcggcgttcatgccgatgcgtttgggaaccagttcgccgaagatgatcgtgaggtaggtgaccgcgatgacgatagtgacctgcgccgtgacggtcgccgtgcgcagcggaatgcccagtcgggccagctctccgccgaatttcgccgccagcgtgtcgccggagtaaatacccgtgagaatgccgatcagggtgatgccgatctgtacggtcgagaggaaccggtcggggtctttggccagtttcagggcctggcgggcgcctgcgctgccttgccgggcctgcatctccagattcgagcggcgggccgatatgagcgcgatctccgacatggcgaacagcccgttgagcaggatcagcagcagaatgacgagaatttccatggaatgtcttgtcggtttgtgtcgcaaagataatggatgtcgggctaaaaccaaagaatatggtcccgggggaattgcttattcgctgaaaaacgctaaatttgcaggcaaaatctattggatatgaatatcgaaacctttatttcggatgcggtccgccggtcggtggaggcgctttacggtgagcttggcgacgagcagttgcagattcagaagacccgcagggagttcgagggcgactataccctcgtaacctttccgctgctccggcgaagccgcaagtcgcccgaagccaccgcgaccgaaatcggcgaatacatggcggccaacgtccccgagatcgcgtcgttcaacgtgatcaaaggtttcctcaacctttcgctcgacagtgcgttctgggcggcccgcttcgccgaggtcgccgccgacgaacgtttcgggcaggctcccgcgacgggccgtaccgtgatggtcgagtactcgtcgcccaacaccaacaagccgctccatctggggcatatccgcaacaacctgctgggttactccgtggcgcagattctcaaggccaacggccatacggtcatcaaggccaatctggtgaacgaccgcggcatccacatctgcaagtcgatgctggcgtggaagctctacggaaacggcgaaaccccggcatcgtcggggatgaagggcgatcacctcgtgggcaagtactacgtggagttcgacaaacactacaaggcgcagatcagggagctggtcgcgcagggacagccggaggacgaggccaagaaaaacgccccgatcatgctccaggcgcaggagatgctgcgcaagtgggaggcccgggaccccgaggtgtactcgctctgggagacgatgaacggctgggtttacgagggcttcgacgtgacctacaaggcgttgggcgtcgatttcgacaaggtctattacgagtcgcagacctacctgctgggcaagtcgctcgtcgaggaggggcttaaaaagggtgtcttctaccgccgtcccgacaattcggtgtggatcgacctcacggccgacggactggacgagaaactgctgctgcgcggcgacggcacgtcggtctacatgacgcaggacctcggcacggctttccgccgcttcgaggacaataggctcgacgacatgatctacgtcgtgggcaacgagcagaactaccacttccaggtgctgaaactggtgctcaagaaactgggctacgccgactggagcgatcatatcacccacctctcctacggcatggtggagcttcccgagggcaagatgaagtcgcgcgagggtacggtggtcgacgccgacgacctgatcgaaggcatggtctcgacggcccgcgagatgtcggccgagctgggcaagctcgacggatgctcggaggaggaggccaatgccgtttcgacgatggtcgggctgggtgcgctcaagtactttatattaaaggtcgatcccaagaaaacgatgctgttcgatccccgcgagtcgatcgacttcaacggcaatacgggtcctttcatccagtacacccatgcgcgcatccgctcggtgcttcgcaaggccgccgaggcgggcatcgacttcggaggagccgccacggcggattacctgcgcgaggagatcgacctggtgaagtcgctgacggagtatccgtcggtggtgaagtccgcgggcgagaacttcgcgccgtcggtcgtcggggcctatgtctacgagctggccaagcagttcaatggctattaccacgaccattcgatcctcaaggaggagaacgccggggtgcgcacgatgcgtctccagctggcgcagcaggtcgcccgcgtcatcaaggagggcatgaaactgctgggcatcgacgtccccgaacgcatgtaacgcattctgtgataatgaaaaacggaggtttcggcgaaacctccgttttttcgtgccgttagcgtggtacgaatcttgcgagagacgaggacgttaactaacactattttagcgtgaaaacatttgcatcaactttcgctctttctctcgcgttgtgtgccgctgccggagcgacggcccaaaccaagagtgcggttccggctcctgcggccgataccgtattgctgtcggagactgccgacggagactacatcgttcgcaggttcatcgtcaaaagccgcggcgacgccgactattcgattcgctaccagatcaatctggcgacgctcaatgccgcgctcaacggcaatccgcaggagctggacggactcaacgcctttgtggacaacctcgtgaaggatacgctccggcaggtctgcgccgtgacgatcacgggctattcttctcccgacggtccgctgaagttcaacgaagcgctggctgccaagcgggccggcgatttcaaggcgtatgtcgacaggaagtacgatttctcgaaaaagtacaaggtgacggtgaattccgtcgccgaggattgggagacgtgccgcgcgctggtcgcgcagtcgtcgatgcccgaccggcagtccgtgctgaacgtcatcgacggcaagcagtcgtccgatcagaaagaattggcgttcaagaagatgccggctgcgtggagctacctgaaaaagaacgttctgccgaaactgcgccgtgtcgaactgacgatcggctacggtgcgggcagcatcgtcgagcagcgcaccatgatccccaaacccaaaccggctccgcagccgcagcccgcgcaacccgctgaaccgtatgtcgttgtcgacgagcaggtgaacggaatcatcgtcgagatgcccgacaggcacgaatacaagaaggaggtgcgcgaggagtcccgggaggtgaagaaggaggcgagggccgccgagcggctcgccaaaaaagaggcccgcgaagcgcagaagatagtccgccagcaggagaaggctgccaaaaagatcgctaaaaaggaggccaaggccgccaagaaagccgagaaggccgccaaaaagacctacaaggagctcgaaaaaatgtaatgaaaaaggattccggatttccggaatctttttttgtccgccgcccgcccgggaaataattcccggggccgcagtccgaaaatgtttgataatccgaaacgttttattacctttgtcagagcaaaaattttaaaatcgactgaatatggcaaatttacgaaacctgaagaaggagattgactaccgccttgaggaggttgttttcgactgcgatatggctatctgtttccagccttcgaaagagaaggagattttcgaggtgatgcaggaggccgtcggcgttcgcaacgatctgttcgccaaagcgatgaatcccgccgagccgcacaacccgtcgctcgtccgcaagcactacgctgccctgcgcgccgagatggacgacgttttcggcaaacttttcgaaaagttgagcaagatcaacgagaagaaatagggtagtcccttccgctgaaaaacaacggagcgtctcatgcggggcgctccgttcgttttattcgtggtcgcggcagcagtcgccggggtggtgttccagcacggtgtgggggatgtgcccgtgcgataccagttgaatcgggcagtcgtagttgcgcaactgttcctcggtcagaatgttcgaacggtggcggtggacctgccggttgacgcagacgatctccttcacgacgctggtgatcgtgccgatgtcgtgcgacaccatgacgatcgccatgcgggcgttcagttcatgcagcgtgcggtaaagctccttctcgaatttgttgtccacgaaattcgcgggctcgtccaggatcagcagcttcgggtccgagatcacggcccgggccagcagcgcccgctgcatctgcccgcccgacacctcgccgatggggctgcgggccgtgtcggcgattcccgatgccgcaagcagttccatcgctctggcacggtcctccttcgtgtagcgggagctgaatccgcggcggccctgcaatcccgacagtacgacctcgaggaccgaaatcgggaatgcgcggtcgaaatccgaaatctgcggcatgtagccgatcagccgttccttcccgcggaacagctccggggcgagagtcagctctccggtgtgggggacggttcccaggatggccttcacgagcgtcgtttttccgccgccgttgggacctatgacccccaggaaatcgaggtccgcaatctccaggtcgacgtgccggagggcctcgtagccgtcgtatgcgacacttacgtcgcgcagcgttaccagattcattttgccgtgattgaatcggtcattgcgtcgatggcgccgatggcgtcttcgtccagcgggtcgatctccacgtattcggcgtcgatgtcgcgggcgatgatctccacggtcgatgccgggaactggttctggtagaaaatccgccgcacgccgtcctcgcgggcctgccggataaccgccgtcagctgtttggccgacggttccttgccgtcggcctcgatggccacctgccgcagtccgtaatcgcgtgcgtagtaggtgagtgcgggatggtagacgatgaagtacttcacgccgctccgggcgatcttctccgccgtgcggatgtccagttccttgagcgtgctgcgcagccggttgtagccggcctcgtatttcaccgagtcgggataggcgttgcgaattgcctcgtaggcgtttgcggccatcgtttgcagggctttgggcgaggtccagacatgggggtctacaccatgggcatgcccgtggtcgtgtccgtggtggccgtgcgagcaggagcctgctatcagatcgataccgcggctcaagttcacgactttcgcctgatccccgactttgcccagcagggtggtttcgaagtcgatcaatcccacgttgaaaatgagctgtgccttgttcagctccacgaactgtcggggcgtcggctcgaacgtctcgggacttgctccgggcggcacgagcacctcgattttgaagtcgtcgccgacaatcccctccacgatgctgcgcagcggggggatcgagacgtaaaacgtattctccccggcgggctgttccggcgtgcaggccgcgagcagcagggccgccagtaagtatgccgataatttacgcatggttgacaatcaatgatttgtgatttatacggtagggtagtcccctgtattttgtgcaaaggtagtaaaattacccgtagcggcgggattttgcggcttgttttgtcgtttcggccgaaatgtttatctttggcccccgattaaaatccccgtatgccgataaacaatccgaaagaggtcctcgccctggtggagagggccgcctccgacaagatttcgcttcccgttcgcaaaatattgattttagcgtttttagctggcgcctatatttctatgggaggcttgttttccatcgtgataggatatggctttccgtcgatggctcctgctccgggattgcagcgcctgctctccggacttgtcttcccgctggggcttatgctggtcgttttcgcaggagcggaactctttacgggcaataatgccgtgctgatccccggtgcattgggacgacgttatggatggcgtaaggtgttgttaaattggatgttggtctatgccggaaattttgtcgggtcgctgtttttcgcctgttttctcgtgaaacttcccggcatgctctctgccgaggcgtggcgttcggcggccgtcggcattgccgaggcaaaggtctcgatgccgtggctcacggtgttcctgcggggtgtcggcgccaactggctggtgtgcctggccgtgtggctgggtttgagcgccaacgatgtcgcgggccggctgctgggattgtttttcccgataatgtgttttgtggcaatcggttatgaacacagcatcgccaatatgtttttcattccgctgggcatgatgcacggtgcatcggtcaccgtgtccgattttctgcttgccaatcttgttcccgcgactttgggcaatatcgccggcggagcagtctttgtcggcggtatctactggtatattaataagtaaaaaacggttgattattaatcaattaatattcgggtaacgaccataatttaacataatgacaatattaattcaattacctttgtactgtattgaaaaagcatcccgattaaaggatgctttttttatggtcgccggccggacgatttgccggacgagttaaattcattttggattttaagcttcggccggcggcggattatcttcctgtgcgtgcaacattcacaaaaatattccgggcgatggcttttagcgctttgtcggcgtgaaactctcgaaggtaaggtcatcgtacaatattacgatccgccggacagcgacgtctgttcgtgtgccggaaaatggagtcgttgccggcggcgccggattttcggacgttgtcgaagccggctcctgatgcggcgggttgaacggcgtattccgggccggaccgaacaatccgtcggagatcgacgattcgaccgcagcggccggtgcggattgttcgggttcgctgtcgcgatacatcttgtcggaatcgagcagcagccagtcgggattgattcgcgggaacctccggagaatcttttgtaacaaatcgaagcccggtttgtttcgcccggcgagaatatgggaaattcccgccggattgatttcgagcagttccgcgagctggctcggcttcaatccttcgtttttcatcagatcgagcaatttttccctcatcagcgcaaatttttacaaatataaagttttttcttttgtaaaacaagtaaaatctacatttgtaaaatgttaataagtgtcgacaaagtttacaagtgtaaataagtcgatatggttaaatttgcatgcaatctatttgttaaagcgttattttagataaataacgataaatatatggtatttgaatatttacgctgtgcactattggcgcagtctacttgtagctggttattgatggattagactatatgatattgaattgtttctttaagtaatattcgtaaatgactgattaatgagtatatattgctcaatgtttaatattttaatcgcttgttggtcgctctgagattgcagtttatttaaaggatgtcgaattattacaattgtaactattgacatctttaacaaacaaatgtgatttacaaatgtaattacatatggaaatgacgcggacattgtgtgtttacatttgtaaatacactaccctattttgtaaaaatggatgcattttcaagctatttccgaacccttatcagacattttgttaacatctccggatttcggatttattatgttaaataaaaagaggccggatagtgttgataacccactatccggcttaaatacagcttgttgtagatttgtaaacagccttctatttcgagagtttgtcggctatttcgcggaactcttccggcgtcagtttgagcttttcgcggtagaaatccacgtcgttttcgctctgaatggggatcagatgaatgtgtgcatggggcacttcgaggcctaaaactacgactgctacccttgcacacgctatttcccgcttgattttggctgcgacctctttggcgaaaagcatcatgcctgccagcgttcggtcatcgaggtcgaaaatatagtccacctcctttttggggacgaccagcgtatggccttttgtcagcggattgatgtcgagaaatgcatagtagtcttcgttttcggctactttgtacgaggggatctcccctgcgatgatgcgtgaaaaaatagttgccatatctttgtttttaggttttgcctatttagcgaccggggcgtcttccgaagtttcggctgcatttttttctgcggcgattcgtttattgcggatcagttccttgatgctgttaaatacattgacaaggatcattatcagcagcaggctgtcggtgaatgtgaacttgtccggttctgcgaaaagcccgaaaatcgcccatgtcgtgaataacgcaccccagaactaaagcgccctgcgctgcattcggaccgttttcgcggcttcccgccggcggtagtcttccagccatttattttcccgaggtgtcattttcgtcatttatcgagatttctgctgtggagagatcagagatcgccccagggcctcttgtccgccaaaatacgcctgttattgacaatgccgagaaggatgctgacgagggagagggcgatccccaacgctccaaaccagtccgaccgggagatgacatcggtacggaataagtagattccccatccgatacttgcggcgattgcgcatccgagcaggatgtattgcagtttcagattgcgttctgccttgtccgggtcccgggcggcggcccgccaacgcagttcttcgggcgtcaagggggctttaggcttggtttcaggcatcttattcctcgaacttgggtttcagtatttccgagtagataatcgcctgccggaggttgaattcttcggtctgggacgttgttgccgcatccggtgcattgtttgtgagggaatgcgcggcgatttcgtcattcccgctgtcgtccatgagccggttgacggtctgatggcgtaaatgccccctcccggcggctttcggcgtcgtatgttccggtgcgtattcctcggcgggaatctcctccagactctggcattcgtccggaaaaacgggtgcaacgggccacggcgcagggcgcggagccggcatcgggtccggttcggactccgggtgtgcctgcgagggccacgcctcttcgtgaccgggtgtgcgggcgccttttccgcgggccttgcgcgattgcgatacgacgttgaatatcatcgctccggcgatgatcacgacccatattaccgttgcgaaatcatccatgtctttaactcaatgttcgtttgacactctctataccctttatcttgcgcagtttgtccatcacggcgtggagactttcggcgtccttcacgtagaggctgacgttgccttcgaaaatgccgtcgtggctgtggatgttcacttcgcggatattgatgttgaaatcggcgcttacgaccttcgccaggtcgagcaggatgccctgccggtcgatgccgcgcagttccgtggtcaccaggtaggacatggccttgtgctgcgaccatttgatctcctccttgacgatgttgcggccgaactgtgtcgcaagacggttcagctcgtcgcacgtggccttgtgtacgatgatgtttcccgaggcggggtctcgataccctaccaccttgtcgcccggaattggcttgcagcactccgcgatttcgaactgcggttccgtggccggagcctcctctgccggggcgatttcgcccggaattgcggcatcgtccgtctcgtcctccttcttctgggggatgaagagggtccagaatttgagtatcttgctcttggagttgaccttgagggctttgtccaggttgtcgagcgagacgattcccgctccgatcttactgtacagctcctccttgttcttgctgtcgtaaatgggcgtgatcttgcgcagtacgcggccgctcaacttgacgttcagcgacttcatcttttcgtcgagcatctgcatgccccgctcgatgttgttctgccgttcgcgtttgaggaaactcttgatcgactgtttggccttggccgtggtgaccgtttcgagccattcgggcttgggacgggcgttgtcggccgtgatgatctcgatctggtcgccgctgttgatctgcgtggtgatcggttcgagtttgtggttgatcttggcgctgatggcgctgtttccgatcttcgagtggatgtcgtaggcgaagtcgagggccgtggctccgaacggcattttccgggcttcgcccttgggtgtaaataccactatttccgatgtatacagcgataacttaaagttgtccaggaagtccacggcattctccgtcgggctgttcagtgccgcgcgtatctgtttcagccacttgtcgaattcgtcctcgtcctgcgaaatggtcgcatgcttgtatttccagtgggcggcgaacccgcgttcggcgatgtcctccatgcgctgcgtgcggatctgcacctcgacccacactccgtcgggtcccatcaccgtcgagtgcagcgcctcgtagccgttggccttgggcatcgaaatccagtcccgcagccggtcgggcttgggggtgtaaatgtcggtgatcgtggagtaaatctgccagcattgggttttctccgacggaaacggcagcggcttgaagacgatgcggatggcgaacaggtcgtaaatctcctcgaaaggaatctgcttgcgctgcatcttgctccagatcgagtagacgcttttcacgcgtcccgaaatctcgtagttgatgttgtcgcggttgagcgaggcgatgatcggggcgttgaacttgtcgatgaactcccggcgcgaagcctcgctttcctgtagtttttgcgtgatttcggcatactgctgcgggaagcggtacttcatgcagaggtcctccagttcgctcttgatcgagtagagccccagccggtaggccagcggcgcgaagaggtagatcgtctcgcccgtgatcttgatctgcttgttcatcggcatcgcccccagcgtgcgcatgttgtgcaggcggtcggcgatctttatcaggatcacccgtacatcgtcggagagcgtgaggagcactttacgaaaatattcggcctgctcggaggtgtcggcgttgaacacgccggacattttcgtcagtccgtcgaccatcgaggcgattttcgggccgaaaatgcgttccatgtcctccacggagtattccgtgtcctccacgacgtcgtgcagcagggccgcgacgaccgatttcacgcccagcccgatctcctcgatgacgatcttggctactgcaataggatgcaggaggtacggctcgccggagcggcgccttaccccctcgtgtgcctccttggccaggaaaaatgcacgtttgatgaagttccagtcctcgtcgttcttgcagatcttggtgcacgagaggagcaggtcgtcccatttctcctttataaggttctcatcctcggcagtatatcccatagactactcctttttggtggtcttcatggcttcgcggaccttggcctcgatttcgttgcgcagctcctcgtcgtttttcagcagctccttgacggcgtcgcgtccctgtccgatcttgcggtcgccgtaggagaaccacgatccggccttcttgaccacgccgtaatcgacgcccaggtcgacgatctcgccgatcttcgaaatgccctcgccgaacatgatgtcgaactccgcgcgtttgaacggaggggccaccttgttcttcacgaccttgactttcgtgcgggttcccagctggtcctcgccgtccttgatgaccgacatgcggcggatgtcgatacgcaccgaagcgtagaatttcagcgcattgcctcccgtggtggtctcggggttgccgtagaccacgccgatcttgtcgcgcagctggttgatgaagatgcagacggtcttggtcttcgagatgctcgacgtgagtttgcgcagcgcctgcgacatgaggcgcgcctgaagacccatcttcgagtcgcccatctcgccctcgatctcggccttgggcgtcagcgccgccacggagtcgatgacgatgatgtcgatggcgctcgaacggatcagcgagtcggcgatttcgagcgcctgctcgccgttgtcgggctgcgaaatgagcaggttgtcgacgtccacgcccagtttctgtgcgtagaaactgtcgaaggcgtgctcggcgtcgatgaaggccgcgatgccgccggccttctgcgcctcggcgatggcgtgaatcgccagcgtggtcttgcccgacgactcgggaccgtagatctccacgacgcggcccttgggatagccgcctacgccgagcgccatgtcgagcgtgatcgaacccgtcgggatgaccggaatgtcgttcacttcggtgctgttcatgcgcatgatcgagcctttgccgaagtccttctctattttctgcatcactgcgtccagcactttgagcttgtccgcgtttatctgtactttttctgccattatggttttgttttgtatcattaactttgtttcggtccgctgctgtcgaacttcgccgagcggcgggagccgttgtttcgccgccttgcggcgtcgggtccccgcccgagacggggatttagggggtgggtcggattcgtaaacgacgcttcaggcggcgaatacggcggtcggacgcacatcggcgggacaaattgtatcctgtccttacttgtaggaatcaatgatctgccggtagtggttcttggtgtccaccttggtgaaaatcttctcgatgcggccttcggcgtcgatgacgaacgtcgtgcgcagtacacccatgtacttgcggccgtacatcgacttctcggcccacacgccgtaggcttcgcacaccgagtggtcggtgtcggagagcagcgtgaaattcaggtcgtgcttgtcgcagaaactgcggtgcgacttctcgctgtcggggcttacgccgatgatccggaatcccatccgtgtcagttcggccttgccgtcgcgcaggcttttggcttcgagcgtacagcccgaggtgttgtccttggggtagaaatagagtatcgtgcgctgtcctcgcagatcggcaagcgtcagaggctcaccgtcttgggtcgtggacttgaaatcgggggccatctcccccgcctgcaactgtgtcatagcgttttccgaaaaagagattattttctcaaaggtatgaattttccggcgattttcatgcttcccgggcgacttttttgcggcctaatcccattggtaggtcacttcgatctgctcgttgaactcctcctgcgtggtgttgagccggtgcaggcaggcaggacaccggatggccgtttcggtctcgacgtattcgccgcacccgacgcacatcggcagcaggccgtagcccggctgcatggagtgctcgaactgcgctccgcagtgcttgcacctgattctgtaagctgttcccattgtcgttttgtttttggttcacgctgcaaaggaacggtctgcgagtgacaggttgtgacacaacggtgaaaaatgtaaaataaacccgccgacagctgtcggcgggtcgttcggctaatggtggtgttcggcctccatggcctcctgccgggtcttgtggaccgtgccgtgggggtgttccgccggggcgtaaatcgagtagattttcagcggtttgtcacctgtgttgacgatgttgtgccattttccggccgggaccaggatcgcatagtcgtccgagacctcgcgcacgaagtcgaggttgtcctcgctgtcgcccatcatcacgcgtgccgtgccctcctccacgcgcaggaactggtcgatgtcgtggtgttgttccagccccacgtcgccgtcggcgggaatcgccatcagcgtcacctgcaggttgtggccggtccacaatgcggtccggaaattctcgttcgcgagcgtgtggctttcgatgttcagcaccgtcggttcggctccgtgatctttcagcgagacgggttcggcggaggcttttgcctgcggggccggagcttgccggcagcacgatgcggcggcgagtgcgaggcacagcgcgccggtcgtcaggaggtgatttcgtttcatgcggtttgctttcaaagtttgtggaaatatagtgaaaaatttacattttcggggtgtttgccgcaatatattcgcggatatagcctgtcagctcgggggagtcgacgatgcggatgtcgtccagcagccccacgacgaagcgtcccaccccggccattccggccacctccgtgtcgagcgaccagcgtccccgccccagcggtttcacatcgcgttcggccagcggatactcctcgcacaacaggttgtaggccagcgttcccagttccagccgcacgcggcggcgcgccccgccgtgcatgcggaaggcgtcgatgaatccctcgctgtgggcttcttggtgctcccacgccgcttcggacagctccacggagccgatacgcgaggttttgaagagtttgttcgtgtggctttcgaggtcgtagcaccacacctgcacgtagttggtcgtgaaggcgaaaggctctaccctgcggtcgcggaccccgcctccgtgggccgacaggtagccgtgcagcacggcctgccgctcctgctcgatggcctcgatcagccgccggatgttcggggcgtttttgccccgcacgacggtgtcggccagcgtcttgttgtcgtagacggagtagagtttgcgcttgaggttctgcttgagcatattggtgtcgtcgatgttctcgatggcgtttttcaggatcacggcctcctcctcggtgaagtgcaccagctgcgagatgtcgcggaagtgcggcgactccttgtcgagacggatgcagtcgcccgatttcttgatcacgaaccccgcctcgcggaaggtgtcgatataccggtagaccgtgcggcgcgacatctggagccgttcggccagctggtcgacgttgtaggtggtgttggccgtcagcagcttcataagccgcagcaggcgttcgagtttgggttggtccataattattcggcagcagacggctgttcgccgtgcagaggtcgtaaattagccataagaaagtcggatgttctttttatgaagtcatcgaatgcaatcagcatcgggtcttcctttccgccgtgagcggcattttcgacaatcatcaactctttgggtgtcgtttcgggcagcgattcgattattttcctgctcatccagacgggagtgcggaaatcgttctcgcctacgatcaggaacagaggtttttcgaattccggagcgatatgtacgggcatcagttcggtcggaaaatcatccggaaccagcaattcattgcgggtcttgtttttgtactgcatgaccaaagggatgaaatcgtcgaaatccgtcggaagggaacggccgatgaaagcattcaccagattgtcggtgtgtgccgtaatcatggacagataggcgcctgtcgaccagccgacgatggccgtcgctccgtccagaacttcctcctgttcggaggtcttccgtatgacagcccggtaatcttccagcatttccgtataacacaggtagttgcgatccattgcaaagggtgagctcttgccgaatccgcgccagtcgaaagtcacgacattgaacccccgggaggtccagttcttcgccagataaagttggaagtaggacatattgcctgcatcgccattgcatatgatgatggtcgggcgctttgcctcacccggcgcttcgtgggttcggcggttttcgttcggattccgcagctcgctctcggacggcgggttttgtgcagggaaaaaccaggtttcgattttatagccgtcgtttgtgatgacttctaaatttctatatatcagctccatgctttccggcttcctgatatatacggtatccggaataattgcatggcagtttgcgattcctgaaaaggacgcaatcaaaagagtgacgaacgctttcatgctgttttcggtaaatatacgaaaaagtcgtgacattgtctgtcacgacccgctttcgggttggttcataggcggtcagtcgagcagttcggagagtttctgcgcgagggcttcgccccgcagttgtttggctatgatcttttccgtcgcacagtcgatcaggaagcaggaagggatgccgcccagcgtatagtcgctccacgcctgtgtctggcgcgggtgcagaccgaatccctgatgaatctgcgtccagcgcatgccgtaggtctcgatgcattcgagccaccgtttgcggttggcgtcgtaggagacgccgaagatgtcgaatccccggctgtggtatttctcgtaaagcgcggcgaggttcgggaactccgcccggcaaggcccgcaccagagggcgccgaagtcgagcagcacgtagcggttgcccggtttacggactgtcgcggcgagtgaaacggtatccccttcgggcgtctgtcccgtgatgtcggcataagatgttccgacatcggcgcgcattccggcgatcgtcttgcgcagtccgagcagggcgggatgcttttgaaatgcagccgggaacgaatccaataatggcagaagctcgcgtccgggacgattggtcagtaattcgttctccagcagggatagcgccagggcgttgcggttctcgagaacgaccgcgcggaataaactgtcgcaggcttcggccgtacgcagcggggaaaggcctttttgcctcaacccggcgactttttgcggcagttcgttcctgaactcgttctgcggcgttccggtcaggatgaattcgtcttcattgcgcttttcaacacggatctcgccggtttcgaggatgaaatccgagtcgctgatttgttctccgtcggcgcctcgtcccatatagaggaaggcgctcaccggatagggccagcttcctttcattgcgaaggacgagttgtcgattcgcgccgagtcgatgatggtctccgggcctccggcataggtgatgatgtacatgtattttccgtcggtaaacgccgggtcgcggcccgtaagggtgaattttacggctgtcgattggctgcaacccgccagaatcgcggttgcggtgatgatcgaaaggggctttttcatgggtttgagggttggtgactccaaatatacgaaaaagtcgtgacattgtctgtcacgaccctctgtttgtaccgacggtatgtgtacccaatttattgggcgagcacctttttttcgatctcctcgacctggcggcggaacgccttgtcggtctcgatcagattcgtcacggccttgcacgagtggagcaccgtggcgtggttgcggcctccgatggccgacccgatcgtcgtcagcggcgccttggtgtgctgcttggccagatacatggcgatctgccgggcctgggcgatttcgcgcgtgcgctccgtggagttgaagcgtgcgaagtccagattgaggtattcgcacacgacctcgatgatgtggtcgatggtgatttccttctggtagagcttcacgtagaccttcagaatctccttggccagcgacgtggtgatcttgcgtccgaggaacgaggcgttggccaccagcgacgacaatgcgccttcgatttcccgcacgttggccgagatgttgtccgccaggtacgccaccacgtcgtccgtgatctgcgccccgagtttctgcgccttggcgcgtatgatcttgagcttcgtgtcgtagtccggcgtgttgagctgggccgacagtccccatttgaaacgggtcagcagtcgctgctcgatgtccttcaactcgacgggcggcttgtccgacgtgaggatcagctgcttgcccgccagttgcaggtggttgaagatgttgaagaacgcgttctgcgtaccggtctttcccgtcagctcctggatgtcgtcgatgatcagcacgtcgatcatctggtagaagtggatgaagtcgggaatctcgccgttcttgtaagccgtctggaactgcgcctggaacttgttcatcgagacgtacagcacctgcaactccgggtggcgctggcgcacctcgtggccgatcgactgcacgatgtgggtctttcccagccccgaatccccatatatataaagaggattgaaggggttgtttcccgggttcaccgccacggacatgcccgccgagcgggccagccggttgcactcgccctcgatgaaggtcgcgaacgtgaggttcggattcagctgcgggtcgatgattattttcttgaggcccggaattacgaacggattctttatatttgcggtgttggtctgcgtgttgaagcgcgagatggccgtcgtgtcggaatccgcggccacggggaccgcctggaccgtcgtgcggggcacggcgtagtggaggcgggtctgctgcccgtagagctgcgagatgatcggtttgaggaacgggatgtagttcttctcgatctggcggacgtagctttcgttgggaaccctcaagcgaagcgtcgtgccgtcgaattcgagcgggacgatgggctgaaaccacttttcgaactcctcggcggaggtccgggccttgatctggtccaagcagttttgccatatatcgctatatgtccgtgtgttgtttaacatgacagagggttgcactatttttgatgtgacaaagttgtgaataattttgcaaaaagattctcgattttatgttgcagttttcctttttttgtatatagaaaaacaacggtttccggggtctcaattttaactccctgatagtgaattatcgaattttatttcgtatatttgcatataatttttttgggacttccgaagtcaaactataaataaaactaataaacttatggcaaacgaattggaacaattggttctgaaaaaagcccagagttggctcgacggccactatgacgaggcgacgaaaaagcaggtcaaatacctgatggacaacgatatgaaagagcttgtcgagagcttctacaaagatctcgaattcggtacgggcggcctgcgcggcatcatgggcgtgggttccaaccgcatgaacgtctatacggtgggcgccgccacgcagggtctttcgaactacctgaagaagaacttcgcgggcgagcgggtgcgtgtggccgtggcccacgacagccgcaacaattcgcgcatgttcgccgagcgtgtggccgatattttcgcctcgaacgggtttcaggtttttctgttcgacgcgctccggccgacgccggaattgagcttcgccatccgcgaactgaagtgtcattcgggcgtggtcgtcacggcctcgcacaaccccaaggagtacaacggttacaaggcctactggaccgacggggcgcaggtcaccgagccgcacgacaagaacattatcgccgaggttgcgaagatcaccgacgtggatatgatcgagacgggcaaaaatcccgaaaatatcaccatcctcgacgagaagttcgatgaaatctatttaaataaggtgcacgaactctcgctttcgcccgaaagcgtgaagaagcaccacgacatgaagatcgtctattcgccgatgcacggtgcgggcgtgcggctggttccggcgtcgctgaagaaattcggcttcacgaacgtgatcatggtgaaggaacaggctgtcatcgacggcgacttccccaccgtcgagtctcccaaccccgaggagcgcaagacgatggcgatggccattgatctggccgcgaaggagggcgccgacctggttctggccaccgaccccgattcggaccgcatcggcgtggcgctgcgcaacaagaagggcgaatacgtgctgctgaacggcaaccagaccctcgtgctgctgttgagctaccagctgacccgctgggccgagcgcggcgagctggacggcaaccagtatgtcgtgaagaccatcgtcacctcgcagatggccaacgccgtggccgagcatttcaaggtgaagtgctacgactgcctcacgggcttcaagtatatcgccaagatcatccgcgagaacgagggcaaagccaagtacatcggcggcggcgaagagtcgttcggttacctggcgggcgactacgtgcgtgacaaggacgccgtgtcggcctgctcgctggccgccgaggccgccgcatgggcgatggatacgatgggcctgacgctctacgagtggttgcaggaactctacgtgagatacggtttctaccgcgagggcctcgtttcggtggtccgcaagggcaaggagggcgccgagctgatccagaagatgatggtcgacttccgcgccaatccgcccaaggcgatcctcggttccgaggtggtgaagatcaacgatttccagacgctcgaaacgctcgacgtgaagaccggcgcgaagaccgccatcgagcaggaccgcagcaacgtgctgcaatggttcaccgccgacggcacggccgtttcggtgcgtccctcgggcacggagcctaaaatcaagttctacttcggcgtgaaggcgccgctggcttcggtcgccgatttcgacaagacgctggctgaactcgacgccaagatcgaaggcatcaagaaagacctcaagctggagtagccccctgctttcggggcggttccgtcccgccgatacctccgaacgatcccgttcggaggtattttttttgttccggggcgttccgggcgtttgcacggccccgaaaagggctggctccgcggccggaccggcgggaccatcggtccgcccgcatgcaacgccctgcatccggaccggccgctaccccgcttccatgcccctgcggagctgatttttgtgtttcggcgtaaataactaattatttagttgtgtaattaaaatattagttgtatgttcgtgtacggataaactaaatttatagttatggcagagatcgtgaagaaccgcccgcaggagctgacccgggccgagctggaaatcatgcaggcgctgtggacccggggggccgcagtcgtgcatggcatcctcgacgaaatggaggagccgaaaccggcttacaacaccgtgtcgaccattgtccgcattctggaaaagaaggggttcgtcggccacaaggcctatggcaaaacccatgaatattatcccctgatttcgaaggacgcctatgcgcgccgctatatggatacggtgctgcataatttcttcggaggttccgtgagccgcctggtttcgtttttctcggagaacaaggcgatttcggtcgaggagaccgacgccatcctcgaaatgctgcgcgaacgcaaatagaaacgaccatgaaatcgcttttgctctatatcctcgaagtgctcttttgcagcggactgctcctggcgttctaccgcctgctgctggtccgcaaggtttcattcagggcctgccgccgctatctggtcgctgccgtatttctctcggcggtcatcccggcgctcgacattccgctctaccctgcccggacggtggtctatccgctgccgctgatcgccgcgcccccggctgaaaacttcgtgcagacgaccggggagcttcccgttgccgttccggtcgtcccatccggctggcggcgcatattgcgcccgatggctgtgggtggctatctgacggcggtgtttctgtcgcttgggtttcttgcggtccgcatggtcggaattcgccgtctgcggcgacggtcgcgtctgaccgattgcggggcgtacacccttgccgagcatccgcagatcgccactcccttttcgttcctgcgcacggttttcctgggcggaggatacgaaggtcgccggcgcatgatcgttctctgccatgaagcggggcatgtccgtcaccgccattcggcggaacgcatcgccgtcgagctggtccgcagtctcttttggttcaatccgttcgtctggattgccgggcggtggttgcaggaggtgcacgaatgggaggccgaccgcgacgtgctcgacgccggttacgaccttaccgaatacagaacggttatttttcaccaactcttcggccataatccggatatagcctgcgggttgaatcattcactcaccaaaaaacgatttgccatgatgacccaattcagaaaacgccgtttcgccgtgctgcggctcggtgccgccattcccgtggtggcagcaatgatgatgctttgcagttttaccgtcaaaactcctcttccggcagccggggacccggaccggccgaccgttacggtacatatttcctccggcggaaagattctcttgaacggccgtcctgtgacggtcggggatctggagcggctgatcgccgccgaacgcgaaaaactctccgaagccgaccgtgcgcagatggaggtggttctgcgggccgacaaagatgctcctatggccgatttggccgacgtgatggacgcgtcgcgccgtgcgcatgcctttcgtctcaaactgactgcggaagcttccgatcccggcatcgtgcggatgcttccgcccgaccccctgcgcctgcctgccgacagcgcggattatgctttgcccgcgacgaaccgcaacgacaggtaattgcccgcgccgtgccgttgaaactgaccgaaccgagacgctgatccctcccctgatgccataagcgggaaatgccccatacgacggccaaagccgccgcatggggcgtttttacggcttcgggccggggctttgccgcggtcggcggcgttttataacttggggttgccgcggtgacgctccttgtcgcgggcggtctttttggcgaaattggcctcgacggccgccgtgaggtccacgcccgtctggttggccaggcacaccagcacccacagcacgtcggccatttcgtcggcgaggttctccttttcgcccgccttgaacgactggtcgccgtatttgcgggccatcacgcgggccagctcccccacctcttcggtcaggcaggccatgttggtcagttccgagaagtagcgcacgccgtattcccggatccaggcgtctacgcgctcctgcaattccttgatttccatcttattttactcttatcagattcagcccgtcgcgcagcgggacgatgacgttctccacccgtgcgtcttcgacgaccatgcggttgaattcgaggagcgcctgcgtgtggcggtcgttgtgcgccacgggctgcacgaccttccccgaccagaggatgttgtcggcgatcagcgccgatccgctgtgaacaagcgccttactgccgtcgtcgcccatcagcatccggtaataggccggatattcgcgtttgtcgccgtcgatgaacacgaggtcgaattcgccgcccagtttcggggcgatgtcgagcgccgagccgatgtgcaggcggattttgccgccatgggccgagcgggcgaaatacgatcggatgaactcttccagctcgtcgtccacctcgacggtgtgcagttcggccccttcctccagccccgcggccatcgagagcgccgagtaacccgtgaaggtcccgatttcgagcgcccgccggggccgcagcatccgtacgagcatctccagcagacggccctgaatgtgccccgagatcattcgcggcgccacggcccgcaggttggtctcgcggtcgagttcgtgcagcagcttctcctcgggttccgaaaaatcgtggacgtatttttcgagagcgtccatctattcctgataaaatccgtgtttgttgaaggcgtacgatgcggcgatttgctccggcgtgtcggcttcgagcgcgagcaggcattcgcgcgtgaattccagataccccgagccgttggccgtcacgatgttgccgtcgcgcacggcctgccgctcctggtagagtttctcgcccgtgtagttcgcgccgccccattcgcgaagcatttcgaggccgtttccggtgtgccttacgccgttcaggaatccgtgggccgcgaggaacgatgcggcgttgcagatcgcaccgacgagaatcccgtgcgacagggcctcccttaccagcgggacgatccgttcggcttcgggtgtcgcccagctcatgccgccgacgaggatcagcccggcgcagtcgtccggcagcgtctccgtatcgcagtcgggggtgagggtcatgccgccgatcgagcgcacgggaactcccccgggcgtcgcataccgcacggcgtggcgtcccgggcgtcccggcataatgccgccgcgaagcgccggggcgaggaatgccgactcccagtcggcgaattggtcgagtaatacgaacaatacggttttcatcttatttgtagattaatcgtgacatatccgaaaaaacctcctcggccacctccgtgagctgccgggccgtcagggcgcggaccttggcgtagacctgctccatggtgtcgatgccgtcgtggacgagcaggcttttgcccgccccgagcatgtagctttcgttgctctcgctcgatatggccagctgggcgatgaactgttttttggccatcgacagctggcgcgtcgtcagcggcacggtgcgcagtttatgcaactgtccttcgatcagctcgatgcactgctccgcgttgctgtggtccgaactgaaatagatggccacgatgcccgtgtctccgtagggcgtgtagctggcttcgatgttgtacgaaagtccgttcttctcgcgcaccacgacgttcagcagcgaattggcgcacggacctccgagaatgttcgtcacgagggccagcggcagccgccgatcctccgagatgccgaatgcccggctgccgatgatgcagtgggtctggtgcgtgtgcttcgaaaccgccttttcgaaggcccggtaaggcgcgggcgcagcgcgcacgaaaccgcgctgcgaggcgggctgcgaggcgaaatagcgtgccgcgacggcttcggcggtcttggccgagaagttgccgatcgacgagaataccatctggtcggtggtgtgcgtgcgtgccgtgaaggcgcggatcgcctggccgtcgtagcgcatcagcgccgccttgcggcccaggatgttgtggcccagttccgaaccttcgaacagcatgtcctcgaaggtgtcgtagatcaggtcggcgggcgaatccttgtaggtgttgatctcgtcgacgatcacctccttttcgcgctccagctcccggtcggggaacgtcgagcggaaagcgatgtcggcgatcagctccgcggccttcgcgaagtcgcccttcagcgtcgtggcgtgaatcgtcgtgtcctccttggtggtgaaggcgttcagctccccgccgaggttttccaggcggcagttgacctgccatgccttgcgtcgctcggtccccttgaaaaaggcgtgctccgtcaggtgcgccagtccgtactccgcgggatgctcgtcgcggctcccggcgccgatcaccagcgcgcagtgcgccacggtgtttcgcacctgacggtgaatgccgcggatgccgttgggaagtgtataggtagagaattccattcaattgaaaattaaagattaaaaatgaaaaatcgggctgcgcggctatttttgcacatgtgtacgacaattcttaatttttcatttttcattcttcattatttttgcgcgcatgcgcaaaaatttgcccgtatggctttcggtgcacttttccagttcgcgcggcgtgccttcgaacacgacccgtccgcccgccgtgcccgcctcggggccgaggtccacgatccagtcggcgcatttgatgatgtccatgttgtgctcgacgacgacgatcgtgtgtccgcgctggatcagggcgttgaacgccgcgagcagtttcgagatgtcgtggaagtgcagccccgtcgtcggctcgtcgaagatgaacatgacgcctccctgcgccgaatccttcgtcaggaacgaagccagcttcacgcgctggctctcgccgcccgagagggtcgacgacgactgtcctaatttgatgtatcccagacccacgtcctgcaacggttgcagccgctcgacgatgcgccggcaggtggcgttcttcttgctttcctcgccgaagaaggcgatggcgtcgtccacggtcatttccagtacgtcgtagatcgacttgccgcggtatttcacttcgagcacctcgtcgcggaaacgccgcccgccgcacgcctcgcagaccagttccacgtcggccatgaactgcatcgagaccttgatcatgccctcgccctggcactcctcgcaacggcctccggcgatgttgaacgagaaggccgaagcgcccagcccgttgtgctgggcatagggctggtccgagaagagtttccggatttcgtcgtaggccttgatgtaggtcacggggttcgaacgcgacgacttgccgatggggttctggtcgaccatctcgaccgatttgagcagctgcacgtcgcccgtcaggccgtcgaaatcgccgggcttcacgcccgtgtcgtagagcaggcgccgcagcgccgggtagaggattcccttcgccagcgacgattttcccgagccgctgacgcccgtgatgcaggtcatcacccccaacggaatccgcacgtcgacattgcgcaggttgttctcccgcgcgcctttgacggttatcgagttgctccaaccgcgggcggttgccggaacggcgatctcgcgccgccccgtgaggtagtcggccgtgaggctctttttgcttttcagcagttggggcagcgtgccgctgaagaccacttcgccgccgttgtaaccggccttgggtccgatgtcgacgatccagtccgcggcgcggatcacctcctcctcgtgctccacgacgatcaccgtgttgcccaggtcgcgcagctgtttcaatacgccgatcaggcggttcgtgtcgcgcggatgaagcccgatcgacggttcgtcgaggatgtagagcgaaccggtgaggttgctgcccagcgaggtcgagaggttgatgcgctgactctcgccgcccgagagggtcgacgacaggcggtcgagcgtcaggtagcccagccccacgtcggcgaggtattgcaggcggttgcggatttcgacgaggatgcgcgacgccgttttcgtgtcgtgttcgtcgagttccagccctgcgaagaaggcgatcagggagtccacgggcatcgccaccagatcggcgatcgtcttgccgccgacgcgtacgtacaacgcctctttgcgcaggcgcgagccgccgcattcgggacaggcggtcttgcccgtgtagcgggccttcatcacacggaactggattttgcgccgctccgagtcgatgtattcgaaaaattcgtcgagtccgtggaaatattcgttgccgcgccacagcagccgtttctgctcgggcgtcagttcgtggaacggcgtgtggatcgggaatccgaacttcgaggcgttctccacgagctgctgcttccatttgcgcatcgtctcgcccctccagcaggccacggcgtcctcgtaaatggtcttgctcttgtcggggatcaccaggtcctcgtcgatgccgatcaccttgccgtaaccctcgcaccgggggcaggcccccagcgggttgttgaagctgaagaggtgttccgaggggcgttcgaactcgatgccgtcggcctcgaagcgcgacgagaactcccgtacgccctcgtccgtgacgatttcgcagatgtccccgccgtaggagaaggcgcgggccaccgagtcgcggatgcgggtctgcgagtcctcgtccgtcgctacgcgcatgcggtcgacgacgatccggatttcgtcggcccgggtgtcgggaccgattccgggcagcacgtcctcgatcagccgcacctcgccgcccgtgtagacccgcatgaggccctccgagagcagcagtgtcagtttttcgatgatcccctgcccttcgcccaataccagcggtgcgccgatgaccacgcgctgtccgtcgcgggcgagaatccgggccgccacgtcatccacgctgaagcagcgcacctcctgccccgagacgggcgaaaaggtgtgccccgcgcgggcgaacagcagtttgaggtagtcgtagatctcggtcgtcgtgcccacggtcgaacgggggttgcgcgtgttgaccttctgctcgatggcgatggccggcgcgatgcccgtgatgatgtccacgtcgggtttgttgatcttcccgaggaactgccgggcgtaggccgagaggctctcgacgtagcggcgctgcccctcggcgaaaatcgtgtcgaaggccagcgtcgacttgcccgagccggagagtcccgtcacgacgatgagtttgttgtgcggaatttcgacctcgatgttgcggaggttgtggacccgcgctcctttgatatatatggagttttcgtgttctttcatgttacaaatattccaatccgcttttccgagtgtttcacactcgccgttatgtaccttttggtggtaaaaggcgcccaaaaccatccgcatgccgttctggcgggagtgccctcggattcgcgttgagcgggcgcagtaaatcgggcctttacggcgcaaaaacacgcgccgtttagactgtggcggctcggcaaacagcaagctgtctgccctcgcctgcggacgcctttacagcccccccccgctccgggcgcgcgtttcctcggtctctctttttccgttgcgaacgataatgcggattttttgccgtcaaaaacggagctgacccgcaaatattccaatccgttgttcgtatttcattccgcttcgtcccgaaccgagccgccggctttgcgcaatttttcgataagctccgctgcgcggctttcgcggatcgcgagccgcatcgtgcagaggttgtcgaaggtctgctcctcgatgcgcggctgctgctccttgacgacccgcatgatggcgttcatcgccacataggggaaatccacccgcaccgtgcggtccaccgtcagttccacgatttcggccgctgcgatggcctcggccgccgactcccggtaggcggcgatcagccccggaacccccagtttcgtgccgccgaagtagcggaccacgaccaccaggcagtccgtgatgtcgttcgagagcagttgtccgaggatcggttttccggccgttcccgagggttccccgtcgtcgttggcgcggaacgcctcgccgcggggtcccagccgccaggcgtaacagtggtgcgtggcgtcgtaataccgtttgcgcagcgcgtcgagccgttcgcggatctcctcctccgtgcgcacgggataaatccaggagaggaacttgctgctccgctcccggcaggcggcttcggcgggggccgcgacggttctgtaactgtcgccggccacgtctaccgaacctttctgaagagccgttcccagcggatgttcgcggggaaactcttttccgcatcgagcgacagccatacgaacgacgccttgcccacgatgtggtcctcgggcacgaagccccagaaacgcgagtcggccgagttgtggcggttgtcgcccatcatccagtagtaattcatcgcgaaggtgtactccgtcgcctctttgccgtcgatcacgatgcgtccgtcgcgctcttcgagcgtgtgcccttcgtaggcctcgatgatgcggcggaagagcggcaggttctccgccgtgagctgcaccgtgtcgcccttcttcggaatccagatcgggccgtagttgtcctggctccagcggggcgcgccccattgcgggaacacctcgtcgttgggggtgtagatatagcggttgaccgaaatgacgttgctcaagcccctgaccttctcggcgagttcgtccgtgaggttcatgtagtagcccgagccgtaaccgctgtactcccggattccgaggttgtcgatggcgtactgcgtgaagggggccgaggtctgcaccacgtagttgtattgcagtccgggtatcgcctcctgcggttcgccgttgacccacacctttccgttgcggacttcgagcgagtcgcccggaagccccacgcagcgtttgatgtagttctcgcgtttgtcgaccgggcggctgatcaccgtgtatttttcgttgaggcgtttgcgtccctcctccttgccgaacgactcctcgaagctgcgcagcgtgtcgtaataggtcacgttctggttttcgagcagcaccgtgtcgcccgccgggaagttgaagaccaccacgtcgttgcggcgtatcggcttgagccccttgaggcggtggtagggccacttgatcgcctcggagaacgatttcttggtctgcgagaagggcatcgtgtggtgtacgaaggggaacgagagcggcgtgttgggcatctgcggtccgtaagccaccttgctcacgtagagatagtcgccgatgagcagcgtccgctccatcgacgaggtggggatgacgtacatctggaagatgaagagatgcaccagcgtcgccacgaccgtcgcgaagatgatggcgttgacccattcgtacaccgtgcggtaggttttgctgcgctggcacatcttcacgttgtggctccagacgtagcggtagaagaacttcgtgatgtagaggtcgaagatgaccggcagtcccagcagcagccagaggttgcccgtccagaccacgaaccagagcgtataaagcaatgcggccagcgtgaaaccgacccatttgttgcgtagcaagtttttgattttacccatgcggaaagccccgattttaattgtgaattatgaattgtgaattatgcattgcgcagcaggtcgtccatcgagtagaccccttgttttccgcagaggaattcggcggccacgacggctcccagggccagcgtgcggcggttcttgatcgtgtgtctgatctccagcacgtcgtcctccgattcgtaggtcacggtgtggatgcccgggacggcgcctttgcgcacggagcggatttcgatccggtcggcgggcgcctctccgctgcgttcgatgcggttggcggcgtgttcgattcccggagccaggttgacccagccctgcttgccggcgaggttttcggcgattccctcggccagcgtgattgccgtgccgctcggggcgtccttcttctgggtgtggtgcacctcctcgatgcgcacgtcgtagccgcccacgcggtcgatcatcgcggccagctgccggttgaggcggaacatcaggttcacgcccagacagtagttcgaggcgtagaacaacgccccgccccgctcgcggcacagctcctgcaactccccgaggcggtcggtccagcccgtcgtgccgctcaccgccgccacgccgcattcgatgcaggtgcggatgttccggtaggccgtttcgggcgtcgtgaactccagcgcgacgtcgatgcccgccagatgtgcggcgtcgagttcgtgcgcgttgtccgtgtcgataatcagagccgcttcgtgccctctttccgtgagaatccgttcgatttcgcggcccatcttgccgtatcctatgatcgctgctttcatttgttttgtcgaaatattcgtacaaagatacgaattatttatgaatctaaacgcaggagagcgtacaatagtattccggaatttcgtatatttgccggacaaatcatttccggtatgcgctattttctcgaactccggtacaacggggctgcctactgcggctggcagcggcagcccgaccagccgtcggtgcagcagacgctcgaacgggcgctcgctaccctgctgcgcgaaccggttgctctgacgggcgccgggcgtaccgacacgggggtcaatgcggcctactacgtggcgcacttcgattgcgaacgtcccgtcgccgatcctgcgcagacggtctacaagctcaatttcctgctgccgggcgacattgccgtgggcagcatgacgcccgtggcggaggatgcgcacgcccgcttccacgcccgcgaacgggagtaccgctacttcatcgagccgcgcaagaatcccttcacgcggcacgagacgtggcagtattacgtgccgctcgacgtcgggcggatgaacgaggcggcggcgatgctgaccgcgtacgacgacttcacctctttcgccaagctcaattcgaacaacaagaccaacatctgccgtgtgaaggaggccgtctggacgatcgactcccgcggcacgatgtgtttcacgatccgtgcggaccggtttttgcggaatatggtgcggtcgctggtaggcacgctggtcgacgtggggcgcggacgttacacgcccgacgggttccgctcgatcgtcgagagccgcgacctgtcgcggtcgagcgccggcgcaccggcccaggggttgtttctctcggacgtggtttacccggcggacatattcgaacatcaatgtttctctaaattcaaaatgttatgattggaacgattgtttggctgatcggcctcgtgtgcgcaatctggtgcgtgctggacattttcaaaaagaacatctccacgggcggaaaggtcatcgcggcggtcgtggtgctgctcaccagctgggtggggcttgcggtctactacttctacggccgcgaccatttgcaggagtggttcaaataaccgtcctgtgcaggcgaaaacatgcggcggacccacagaggtccgccgcatgttttttccggggatggccggaggcctttacaggtggatcgccgcgcccagggccgcttcggcggcttccatgacgccttcgttcatcgtcggatgggcgtggatcgtgcgggcgatccggtgggccgtgacgcccagcgtgcgcgccagcgtcggctcggccagcatctcggtcaccgacgctccgaccatgtgcgcccccagcaggcggtcctcttcgtcgaagagcagtttgacgaatccgtcgcggtcgcccgccgccgtggccttgcccgatgcggtgaaggggaagcggccggctttataggcgatgccgcgctcctgcgcctgctgttcggtcatgccgaccgacgccacctcgggctgggtgaagatgcacgacggaatggtcgtgtagtccaccggcgcggggtcgagtccgcagatggactccacgcagcagacggcctcggccgaagccacgtgcgccagcgccggacccggcacgatgtcgccgatggcgtagacgcccggaacgttggtgcggtagaattcgtccacgacgaccttgtcgcgttcgacggcgacgcccagctcttcgaggccgatgccttcgatgttggattggatgcccacggccgacagcacgacatcggccgtcagggtctccgcgccttttttgccctcgatctccacttcgcaaagcccttcggcgttgaccttcactgctttcaccgtggtcgaagtgagcaccgtcgcgcgcagtttgcggaatgcgcgctccatggtcttcgacacctcctcgtcttcgagcggcatcatgcggggcatgtattcgacgatggtgacccgcacgcccagcgaggcatagaaccaggcgaattcgctgccgatggctcccgaacccaccacgatcatcgacccgggcaggcgcgtgagcgtcagcgcctgccgcgacgaaatcacatgttccccgtcgacaggcataaacggcatttcgcgcggcttggctcccgtggcgaggacgatgtggtcggcctcgtactccgccccgtcgacgtctatgcgccccggggccgtgagccgcccgaatccggggatcaggtcgatcttgttcttgttcagcaggaaccgcacgcccttcgacatggtttctgccacgctgcgcgaacgcgccacgatggcttcgaggttggggcgcacctcccctgcaagttccagtccgtaatgctccgcgtttttgcagtatccatagacctgcgcgctcttgagcagcgccttggtcgggatgcagccccagttgaggcagacgcctcccggttcggcgcgctccacgagcgccgtctttttccctaactgcgcggcgcggatcgccgccacatagcctccggggccgctgcccacgatgatgatgtcgtactgcatcatttcactgcttttagtatttcaccattgtctttggccacggcgcgcttccatttctcgttgtagcccgggaactggatcttgccgggaatctgtttcccgtttccgttgtcgacgaaatgcgccgcagagccgtcgccgtcgaggaacgtcagcacgtcgccgtgctcgctcttgacgttgccgtccatgtatttcaccagcaggtagttgttgagccgctgccagcggtcgaacagctgctgcgccgtctccacgctcaactgcgtgaggtggctgcggcgtgcctcgggcgacatttttccgactcgggcgttgagcgcctgcatgttgcggagcatgtcgttttcccacttgtccacgaccttgcggatgtccgcggagatcatgtcgtagcgcatgtaggcgaaattggtcgtgcggttgaagagccagaacgccgacgtgggcgaatattcgagcatcgagccgttgtcctcgcggaaacacccggggacctcctgcgccgagcagaagatcggcgtcaggcacgaggtggctgcgtcgtccacgccgaaccagagaatgcccatgtcgcgcgtcacgtcgggccgggcctgcgccacgaaccagaatccggtctgctgggtggccgtggcgcgctcgttgacgtacttcacgccgtcgacctcgaattccatcggacgccagcggtaggggcagttgtggcctccggcgccgagatccgtggtcatgtccatcggagtcccctcgtagtggtcgcgcatgcagtcgaagagcgtcttgggcgacacctttgcgcggggtttgacccacagcggcatgcggttgttcttgttgtggcccatcgcgtagtcggtgtatcggtccatgtcgtcggccacggtgcggaagaaggcccacacgcgggcttcgcaggcgcgcatgccgccgaagtcgagcggcgcgtaggcgtccgagaagctgaaatcggcgtccgggccgtcgtagtaacccatttcacgggcgaacgagatcacgtccggggagtagaggcagttctcgggatcgtccttcgggaaggtggtgatgcgggcctggttggcgtgggccgagacgtagccgtcgggaatgcggcgggccacccagacgatgcctttgcgggcgttgccgcccttgccgtcgtccttgaaacccttgccgatcagctccatgatccacgcttcgtcggggtcggcgatcgagaacgactcgccgctcgacgcgtagccgtaggtgtcggccagctcggcgatcacgccgatggcctcacgtgcggttttggcacgctgcaaggtgatgtagatcagcgacccgtagtccatgcggcccgtcgagtcctccagttcggggcggcctccgtaggtcgtctcgccgatgatgagcgaatgttcgttcatgttgccgatggtcgaccaggtttcgcggacctgcgggatgtccgtcaggtaacggcccgtgtcccattcgtagacgggcagcatcgccccggatttgtgcttgccgccgggggtgtggtacagtgcgccgtagagcgcgtgggagtccgccgcataggtgaccatcaccgaaccgtcggtcgaggctcctcgggtgacgatgaaattggtgcaggccgacgccgcgccgtatgtgagggcggccgccgctgcaagaatcaatcggatttttttcatgcttttcaggttttgagaccaaagatacgaaaaagtcggatggattcaaaaccgaatcttccgactggtgaataaaaatgtcgttacgacgccaaagatggaaaacaaatcggataacggcgaaaaaacgttatctttgtgagcggatgcgctttctgcgcaccccggaaatacccccccccggagtggtggtaaaaatatgaaatccagctatttgaatgagaaagatgctgtttctgctcctttccggggcgatcttcggggcctgttctccggacaaggatcgggttcccgttttcgtgaagaacgtcgtcatgccgcccgattcgtgggtctttgcgcccggcgacggggtgaccgtctcggccgaagggttcgaggctgatgacgaaatcatgctcgaaatccattggcaggagagtgccgaggggttcgctccggagggctatgccaagggagtgcgcgggatcgtcatggtgcgttccgccacgagcgtcacctttctggccccggggcactaccccgcttcgacggttcgggtgctgttgctccgccgcggcaggatgatgccgctgggcaagatccgcgttgccgacggaaccccgaaagccgaagcgctctacggcatttcgaagtccgatacggacgaaaccctgatcgagcgcatcgacctgtcaacgggcggggtgacacgggttgcgacgctcggcatcggccggggaatcgcctgcgccgtggggcttcccggctcgggctggatttacggcgtttgctccggttcgatggccggtttcgacctcacgatgaattattatgacgatttcggataccggaatagtctcttggccgggcatatctccgattcctccgtcggactcatttcccacgacgcggggcggttgacgctgacgacccgaagcgcgacccgctctccctccccggttccggtctcctggcaggtgcccgacgaggtcgtgcagacgctggccgtgcagccgttcgtgcgggtcggttccgatctgctgctcgcgcagcgcaatgccgacgggacgtgcgctccgctggtgttgagggtctacggcggggcgggaccgggcgaagccgtcggggccgatgcgatgatccccttttggaccgtggtcgcctcggccgacgagccggacaggatggttcaggcgggcggctatgccgtttcggccgggggcaaaacgcagctgcggctgttcaacgccgccggtgacggcgctttcggcgagacgctggccgaagttccgggcacggcgctttcggtcacggagtatgctcccgataaggattcgctggaaatctacctgctgtgcgaggcggacggcatgcgccgcattcacgtctacgatgcgctgaagaagacgcagcggacccttcccggggagttcggctgctcggagatcgtcatggcgaaatagtgttttcgtgcagaaaaacgagtcgcagacccggatttttcccgggtctgtttcgtgttgtacgaattttgcgtatttttaccgggcaaataccgaaaaacttatgtcttcaatagcctgtcaactgtcgttcgtgcgctcgacgcttcccgagggggtgaagctggtcgccgtgtcgaaaacccaccctgcggaggcgatccgcgcggcctacgacgccggccaccgcgttttcggcgagagccgcccgcaggaactgcgcgaaaaacacgaagccctgcccaaggacatcgagtggcacatgatcggccacctgcaaaccaacaagatcaaatacatcgccccgttcgtcgcgctgatccattcggtcgacagcgcgcggctggccgaggccatccagcgcgaggcggccaagtgcggccggacgctcgaaatcctcctggagatccacgtcgccgaggaggagaccaagacgggctggaatatggccgaactgatggagtatgtccgcacggccccgtttgcccgtatgccggacgtctgcgtgcggggcgtgatgggcattgccaccaataccgacgacggcacggcgatacgccgcgatttcatggagctgaaacgctgtttcgaactgctgcaaccctacttcggaccgcggttcgacacgctgtcgatgggcatgtcgcacgactatccgctggcggtcgagtgcggctcgacgatggtgcgcgtcggctcgttgatattcggccggcgcgggcttaagaagcccgttttatgagtggttgctgtacgaatgataaattataccagacttatatgaaaatcggatttcttggattcggaaatatggcgcaggccatggcgggcgggcttgtccgctcgggggccgtgcagcccggcgacatcggcgcgtgcgcgcgcgaccgggcgaaactgcggagcaacacggagccgcagggcttccgggctttcgacgacgcggcggcggtcgcggagttcgccgatctggtcgtcgtcgccgtgaaaccctatcaggtcgaggcggtgcttgcgcccgtccgggagcttctggcgaagaagatcgtcgtatcggtggccgcgggcgttacgttcgacgactgcgagcggatgctcgcccccggcacgcaccatttgagcatcgttcccaatacgcccgtttcggtctgcgaaggcatcgtcgtctgcgaacgccgccattcgctttcggacggggagtggcggcaggtggaggcgctcttctcgaagatcggcctcgtcctgccgatggacaccgccctgctcggcatatcgagtgccgtctgcggctgcggcccggcgttcgtcgccatgttcatcgaggcgctcggggacgctgccgtcaagcacggcgttgcgcgtgccgacgcttaccgcatggtgagccagatgatcgtcgggaccgggaaattgcagcttgcctcggggcagcatcccggtgcgatgaaggacgccgtctgttcgcccggcggaacgacgatcgcgggcgtcgccgaactggagcgcaagggcttccgcggcgcggtgatcgacgccatcgacgctattcagaacaaaaaataacccgcccgcctaaaaggcgggttttaggggcggatagtggcttcgggacgcttgtcatccggttctgcgcccgcccgcctaaaaggcgggttttaggggcagacggtggcttcggggcgcttgtcatccggttctgcgcccggggccgggaatcgttttttgggggctgcgggacgaagcgacgccgtttgcgtccgaataggaaaaccgccggacctctgtgggttcggtatttgtaggtaaagagaagcgcaggaaagagtaaatatcatgtttacaggtatttaattccctgttctgcatctgttccgagcaataaaattgcagaatcgggcaggattaacggtgagttgtgttacttatccgttacctgcccgaaatgctttgatttacactaaggtgcttgttttcagcttattgtgttggatttccgcataacaaataacctgacttaacgtttaacaaaaccacaaagttcaggttatcatgcaacgcagcactttcaaagtccttttctatgtgaagaggcagtccgagaaatcgggtcaggttcccgtcatgggtcgtatcacgatcaacggtacgatgtcgcagttcagctgcaaactctcggttcgttcttctctctgggatgccaaagcgaacaaagccgcaggcagaagcctcgaatcgcagcgcatcaacgagaagctggagaatatcaagaccaatatcggcaagcagtaccagcgtctctgcgaccgggattcgtatgttacggccgaaaaagtccgtaacgcctttctgggtatgggggacgactgccgcctgctgttacagactttcgacgaataccttgcaggcttcctcgaacgcgtgggcaaagaccgcgcctattcgagctatgacaattaccgcaaacgccgtaaccgccttgcctctttcctcgaatacgaataccacgtcaaggatattgcgttcaaagagctgaagcgggagttcgtggaaaagttcgtcgtctacctctccacggtaaagggtcttgcttccgggacgatccattctacactcaagaagctgaagctgatgacctacacggcgtataagaacggctggattcccgccgatcctttcgcggggttctatgtcaaagcggaatactcggaacgtcgctacctctcggcttcggaattgcaggctgtcatggatgtcaggctccccaactatcggacaggcatcaaccgggatgccttcgtcttctgcgccttcacgggcctgagccatgcggacgtggtgaaacttacccacgcagatatttatacggacgataacggggatcggtggattatcgacaggcgccagaaaacgggtacgcagttccgggtcaaactgcttcccgtcgccgcaatgctctacgaccgttataaggacatgcatctctcgggagaccgggtcttcccgctcaaaggcacctataatacgttgaacatgtcattacggcatgttgccagacacgccggtctgtcattcaacccgacgatccacatggcccggcatacctttgccacgacggtcacgcttacgcaaggcgtgcctctggaaacggtcagcaagatgctggggcacaaacggatcaccacgacccaaatctacgctaaaatcaccaatgacaagatcggacaggatatgaaggcattgagcgagaaactcagcagcgtcttcaaggtcgcacagtaacccggcgcgatcccggaatagcgcatatctaatatcttcggaatttatttccgccggcagggaattaaacgccggagatggaaatccgcaaggccatgcgaatcgcccaaagggcgagccttgcgtatttccatctccggcattttgctggtcgcatgtagatttgcagcgtgatgtaatcacaggtaatttcgatatggagtcgcagtgaaccggggcttgtcgtaagctttgaggcttggcggtagatttggactgcgactccattaaccagagagaatggctgtttagaattgtaggtttgaagacctggtacatgtgatagcatacgactctcacaaaactaacaagttatgcactatttgtattatgtgggtctggatgtgtcgaaagagactttcgatgcgtctttggtcgccttcgaggatgcaaacgagatggctcaccgcaaattcgccaactcccgaaaagggatctgctcgtgtctgcactgggttgagaagcggcatggtattcggctcgacgatgtgattttctgcgccgaggatatggggagctacatatccgagatggcggtttgtgcttccgacaggacgctgaatttcaatttttcactgatctcgccgttggtaatcaagtattcgatgggtattgcccgtggcaaaacagacagagtggatgcccggcgtatcgccgagtatgcgatcactcactatcggaagatagccctttatctgccggcagagaaggaactgtgtcagttgcgcacatggctgatcttaagggctcatctggcaaaacaacgtgtagcgaaactggtgttgctcgaaaaattagactacaaagagaaattcgcggatgtatctattcaacgttccatgctccaggaggagatcgcgtatgcagaaactcatatgaaaaccatcgaacgggaaatgaaggaactgatagccgccgacagcaacatttgccggaactacaagctgctgaccagcatcaaaggtgtagggccgatcacggccattgtgatgctctgttcgacgcttaatttcaccaaaatcacagaccaccgcaagtttgcctgctattgcgggctggctccgttcgaacataactccggcacaagcgttcgcgggggatgccacacatcgagcatggcgaatcgagacattaaagtacaactgaaccgcagtgcactgattgccatcaggtgtgatccgcaactaaaggcatattacgaacgcaaagtggctgaaggtaaacataaattcagcgtcctgaatgctgtgagggccaaaatcgccgccagatgctttgccgtcgtaaggcgtggaacaccatatgtagcgttgcagatataatccggcatacatatctgccattcgataagattttgagatcattcaaaatctcaaaatcttattgtcggaacagtccgtctaattggggccgaacctactcataattaatgtattgtcatttccgtactccgcaaattaacgattctgactatgggatgcaaggctatacaagcgcttcgcggccttgcatcccatagccagaatcattttgctaaacgctacgacaaaaaatgacaatttccgggcatgaaactttttgcagcttttatttggttttatcttagaattctaccgtcggaaaaggcgacattctgcggctcctgacgatccggttctgatgttcagccgcgagcggcctgcccgttcgacggccccttccgtcctgctatctgccgtcgaaataccccgctttttcaaaacggccgtctgttgttcttcttctcgtggagataattcaactcgtcgctgtaaatgtccatgacgaaccgcagcatattgtcggccncgttcgacggccccttccgtcctgctatctgccgtcgaaataccccgctttttcaaaacggccgtctgttgttcttcttctcgtggagataattcaactcgtcgctgtaaatgtccatgacgaaccgcagcatattgtcggccaatgccgtaagccttgtcgtatcgtctcccagcaggtggaggattgccgacactttgcacttggtttgggtactgacatagatcgcagagcgattacggcaatccaccggagcgaagaacatgcgttcgaaatccggaagcgcgagctttttacgccggaatccggccgactcctttccagtagtcgtttgggtgtcgacgtctgttttctcagcagtcggtgccgatgctccggataccgtttccgatgtgtttccctcgggagtgtccgtatcttcctcttccggttcgggaatcctgcggacgactttcgaatccaaaggggcctgtccggcgatcatctgacgcatcaactcctcgtcgacttcgatacggggatgtttagaaggattgggtgcaggtttgtctgtttctttcaatgaatccatggtgcaacgtttttgagattgattgttagctatacggtcgtaaagcgtgtatgtttggttttatgttttaaaccattcaaaatatcgttttccgtttcatgcggtttatatcgggataacggccggcgaatccataggaaccagtccggcgatcatccgacgcatcatctcttcgtcgacctcgatatggggacactttaaaggtttgggtgcgagtttgtctttttcttttaatgaatccatggtacaacatttttaagattgaatgttcgttttgcagtcgtaaagcatgtgtgttcggttttatgttttaaaccattcaaaataccgttttccgtttcatgcggtttatatcgggataatgaacggaataagaaaaccgacctttcatgctgcaagatacaaccgggtgaaataccttggttccgatgtccgctccagaccgctccagtccgcaccgatggattttttttgccttgtcccgtcctgaaaaaggtttacagaaaagagtaaatcttatgcagcaaacaacngcaagatacaaccgggtgaaataccttggttccgatgtccgctccagaccgctccagtccgcaccgatggattttttttgccttgtcccgtcctgaaaaaggtttacagaaaagagtaaatcttatgcagcaaacaacgaattcagacttatcacgtcattatttaccgcgtcagttgcgtcatctgattttacaggagtatttgagcggagtcaagacggc

SEQ ID NO: 5 - RNA, 249682 nt, Alistipes shahii
  source 1..249682: mol_type = genomic RNA
agctgcgattggcttacgcccttggaagcggaacttagaaccgggaaactcaaacatcattggggccgaaagacggttgttcggaaggcatatgtaaacttatatcaggacaatattttttgaaccaaaatgtttatctttaattatcaatcactgtaaacctttttcaggacgggacacgcccgcacggttgtaatattgtaaccgggaaagacccgccctcggaagccgtagcggaggttttcaaagttttcacaaaaaattttccgccgcggatttttgttatcgccagataacagcgagctgtacctttgtccgacaaactaccgtttgtccgacaaaggtcctcgctctgcgaggccgggcgttctccccagtcgaacgccttttgaaccgatattatggataccaaccgaaaacagaccgacatgaccggcaagaagctccgaacaccgagttataaatactctttccggctcaatgaagagcagcatctccgtttcaacgaactgctcacaaaggccggatcggagcataaccggagccggtttattgtcaaaagaatcttcggcgaggagttcgtcgtcgtcaaacgcgacccctcgaaagtgcagttcgtcgcgcggctgaacgacttttacttccagtttcagaagctgggaaacaactataatcagattgtaaaagccgtaaatgcgcacttttccaacatcacgatcccgcatcagatcgccatgttggagcagcggacgcgtgagctgaaagccctcagtatcgagattctgaactttgcaaaacaggctaaggagtggttgcgaatataaggtcgggatcctcgcccggcggggctttacactacaacaaggagaaagtagaccgggatgaagccaaaatcctctattggcagcagatgctggagcccttcgacaaacacggacgaatggatgtcgacgcctgcatggagagtttccggccgtacctcgaagccaaccgcaggacgaccaatacggtattccatgtctcgctgaacccttcgccggaagataaactgaccgacgaacagctccgggaaatcgcaaatgaatacaacatgcagaaaatgggctacggaaatcagccctatattgttttcaaacataaggatatctcgcgcgaacatcttcgcatgaatacgaccgttccatgtccgtattgcgggaattagaacggaaatataatctgcatccgagtatcaaggggcaggaactgacggacagggagagcctgcggaaagtgaattatcccgaggggaatgtcaagcagcaggtatcgtctgtcgtgcggtcgtgtctgcgcaattacaaatgctcctcctatggggagttgcgcacgctgctggagcggttcaatgtctccattgaggaacgcacaggaaccatcgacgggcgaagttatgccggcatcgtctacggagccatgaccgacgacggatacggcgtcggcacgccgttcaagtcgagtaagatcggcaaggacgtaggttatcgggctttgcagaaatactacgagaggtcgaaggctgcattgagagaaaacgatgccctcgggaggttgcggcgagccgttcgggatgccatgagtccgcataatacgcgggacgagttccggcggctgctcaaggccgacaatatagatgctatcttccggatcaatccggtaggcagaatttacggcgtaacgtttatcgaccacaacacgggtatcgtcgccaacggatcgctgctggggaaagagtttcggcgaacgcctttaacgagttatatccggcgccgaaagagatgcaacaggtcgcagaacaacgtccggaacagcgacgagaacaacggagtcacacggcaaatcccatttcgggaatcgtcgatacggtattggatctggccgatgcaagggcttacgaagaacagcaacgccgaatacagcgacgaaaaaaacggagatcacataagtaagggatatagatgtattgaaaattatatgatgtattcacagggttgcatcattcattttaatcacggcatgtctcacattaacgggatgtatgatgtcgagcatcggatatgaagggcgtattttcgatgtcaatgtcgaatctttcgaaaggaagaggaccccctcccgggtattgaaaaaacaggttttgcaggataccgcccgcagaactcgcaagacttgcgaagcgggctttcgttgccgaggccgctgccgtgcgattccgggaatggccgtctgcgcgtcggtcggagagctgatctaccgattttccgattcgatgcggtgcagcacctccgtgcggagaatgcagcttgcggggccttcgcagcggatgcgcagggtgtgcgcgccggtgcgtcggatgctgatgtcgccgtgacgatcaatcgtgcgcagcctgcgcaacgacctgccgggaagcgttacggtgcggtcgcagcgtcgtttgcagtcgatcgccagcacccgttgctctcccgcgagcgcttcgtagcacaacagctccccgtcgtcggcgatcggggaggtgaaccaggtgtagacgccgcgccagtgcagccggtccccctcgtgcaccggctgccgggccagaagccggtggtagctcttgccgtaggagttgccgatgaataccgcgtccgaatcgtcgagccgggcgtggtcgcccgtaccttcgggcagcagccagctcgattgataggcgcggtcgtttttctcgacgaagcgtcggaatgcggggtagtcgcccttggtgaagtgggaaaccgcggcctgcggggtccagtcggcataggctccgtcgggggtgagcgtatgcgtctcgtcgcagaacatcgactgcatgccgtagtaggtgcggatcgtcgccgggacggagttgtggaactcgtgcgatacggctacttcgatgttgttttcccgcacgcggtagcatacccgttcggtgcacagcggggtttgcagttccgctctcccggcggagtctgcgacgggcatccgcgggtcgaagatccggttctccacgcggatcgtcacttcacgggcccgcagcgacgtgtcgcccccgatgcaccggccgtcggcctcgatcgatactccgacgtgccgggccgtgcggacggtgccgccctcccgccaggagtgattcgctccggcccatccgtagccgtcgattcccaggggcccgaggttgtcgctcgtggcccggttgagcacggtttccgtgttccgctcctcgacggcgacttcgtagaaggtgaacagctcgttgaacatgcaccggcggaaggtgtagcggaggttccggccctcggactccgcgaagcggatccgaagctccccgccgcgcagttcgaccgcgagattcgcgccgtcggctttcggacagccggcccgaaaggccgcagcccggctcgtatccttcgatacgggccgggccggggtcgttcgtgccgtcgtcaggagcagcacgagcagcagtgtcgtcgtgcgaaatcgcatcgcggcactactttttcatgtagggtttcatgtaggggcgcagcgtttcgacccaaacggcatagcccggtcccgtaaggtggatgccgtcgtgggtgaattcttcgggcagggcgccgttgttctggatggcgctccagatgtcgatgtagggcagattgcgacgctcggccatctcccgcagcacggcgttgaatccggcgatacgcttgtttttgcccttgaaataatcctgccggtcctcgacgagcggaagcaggctctggatgtagaccttcgtgcgggggctctcccgggcgatgatgtccagcatgcgttcgtactgttcgagcagtttttcgtaggaggtcttcgagaagatcaggtcgttggtccccgccatgatgaacatggccttgggcttgcccgaaaggatggtctccaggcgggcgatcatgcccgatacgcagtcgccgccgatgccgcggttgagcacgtaggccggttggaaatattcgccccacaggccgcgttccgtgaggctgttgcccagcatgacgatgttgtgcttcttgacgggcgtgagttcgtagaaggcacggcgccccgggtagtaggtcttgtcgatgctcagcgtgtcgggttttgctgcggcggtgtccgccatggccgtggcgattacgacggataggaaaagtgcgatttttttcatgtcgtgatgcgtgttgaggttatagggtttctgcggttatcggttgtttttcgtcggaggcggattgtgcggcgcactgctgcagaatccgccacaactggtagagtccgcgcggcacgtggaagcaacccttccatttgccgcccttgagcggcagcagcacctcgccgcggcggttcagatagccgaaccattcgggatactccgcgtccttgaagtgcgaccacatgtactgatcgagcttctcgaaccaggccagacacttgcggttgcccgtgagctggtagcccttgagcatggcgatggccgattcgaggtgcacccaccacagcttctggtcccattcgagctgctgctggggatgccccagacggtccatgaagtagaagatgccgccgtactgtttgtcccagccgtattcgatcgtccgcagggcgatttcgacggcgcggtcgatcagatcgcgccggccgagccgtacgcccatgtccatgacgaaccacatggcttcgagcgagtggcccggattgatcgtgcgaccctcgaatgagtcgacgagcgaattgtcctcagccgagacattctccacgatcagacccaggtccttctggtagaagacgtcgagcacctcgtgcaggcactcgtcgatcgtgcggtcgatcagctgcgggtcgatgaactcctcgatttcgagggccaggttgcacaggatcatcggcagggcgaaatccttgatcgggcgcgttccggcgtgtgccttgcaccatttgtccttggggttgtcgcgcttttcgaggatgcggtcgaacgtgcgtttggcgatctgcgcatactccttgtcgcccgaagccttggccagctgggcgaaggccatcgtggcgaacgtgtaggagaagatgttgtagggctcgatgagcggccgtccgtcgcgcgtgagcgagaaataccagtcgtagttgccgtcgtggccgtatttgcgcaggaactcgccgccctgtcgggcacatttgagccattcgggacgattctccaccttgttgcacaacatcgagaagagccatacctcgcgtccctgcaaccagatgaacttgtccgtatcgtagacgctgccgtcgcgatccaggcaactgaagtagcctccgcactccttgtcctgggagtgctccagccagaagggcaatacgttatcgaaaagttcggattcgtattttttagccagttgttggaaattcatgtttgtccgtatgttttgtgattaattcatccagtatttttcgatctcttcgagcgaccggcccgtcgtttcgggcacggcgcgccacatgatgacgatgtaggggatgcacatcgccgcgaagaggaagaacgtgcctgccggcgtcaggttttcgagcatccacggggtgagctgtccgatcaggtaggtgcccacccagagcgaaagcccggcgatcgacatggctatgccgcgcacccgcgtgggatacatctccgagagcagtacgaagaccacggcgcagatcgacacggcgcagcagaagacatagaataggaagaagacgagcaggaaggcgttcgggagcccccatgccgttccgaagaggaagtagacgccgatgccgatgagcgacagaatcatgcccgaaacaccccagtataccagttgcttgcgacctacgcggtcgatgatcgccagcgcaaggacagtggtgagcatgttcaccgtgccgaccagcacctgcgaaaagagcgagtcgccgctcgacagtccggcattctcgaagatcgtcggtccgtagtagagcacggcgttgacacccatgaactgcccgaggatggcgatgaaggcgccgatggccacggctcgccggatgccgggttcgagcagcgcgcgccattgcggttcgtcgctctttcggaaggtcgcgcgtacggcggcgatctcctgctcggcatcgtgccgggcgggatagatgcggctcagcacggtgcgggcccgctcgtcgctgcctctgagaagcagccaccgcggactctcgggaatgaagaacagcacgaggaagaacagggccgcggggagcgtctcggcgccgaacatgccgcgccacctctccgtgatccagatccgttgcatcgtctcggaggcgtaatgtgccgtctcggccgaacggaggatgccgaaattgaccagataggcggccaggaatccgaccgtgatggccagctggtagagcgacacgagcgacccgcgccagcgtgcgacggcgacttcggagatatacatcggcgatacgatcgacaccacaccgatgcccacgccgccgatgatgcggtagaggatcagttgctgaaagtcggcgcagagggcgcatccgacggccgagaccgtgaacagcacggccgagacgagcatcgtgcgcttgcgcccgaagcggtcgctcatcacgccggcgacggccacgccggcgatcgagccgaccagcgcgcagccgacgaaccatccctgctgcatggcgtcgagtccgaattgcgtcgccacgcctgcgatcgttcccgagatcacggccgtgtcgtagccgaacaggatgcctccgatcgctgcgacgaccgacagaaagacgatataacccgtattggtttgcgttttcataggctactcgatctcgaaatactccttgtaacggtcgtagaggtgcccggcctgcagataggccgactggggcgacatgaagtgcgagaactcgaaggtgatcgccttgtcgtacccggcgcgcttggccgcttcgagcttcagacgcagcttgtcgaacttgatgggcgggaagcggatgggcatgtcgcggtcgaacgactcggcgttggtccagcatttcatgccgtatttgtccgccaggcgcttgttgatcgagaagaagaggtccagctcgtcgtagtcgatatgtccgtcctggaaggcgcaggcgtccaccacgtcgtggatgccgtcgaatatctcgtcccattcgcgttcgtgctcgtcggccgtcacggcgttctgggcgttcgaaacggccttcttgccgtcgatccagggcgagatgaaggtgggcagcccgcccgaaacctccttgcactgcttgcccatcgcgtggaaggccccgatggcaccccgagtcgcgcggctgatctcgccgctgatataccatccgccgaaactgcggtatttctcgccgtagagacgccaaacctcgtcgatgacgtatcggttgtgctccacctcgtgcgacatgtcgtgcgtgtcccagtatttgcccgagtcgtagagcccgaagtagaacttcatgccgtacttctcggccagccgcagatacatgtccaccaagtcgaccgagggcatgtagcacccctgccccagcaggtagggcgaggggtaggtgatgaacttgcggtagcccgagcggatcaggatgaccgtatcgatgccgatggctttcatgtagcggaagtcgcggtcccattcgcgctcgccccagttctgatggggtatgtcgtgcgatatctcgtcgaggaacgtgccggtgatgcgcatggcgtcgcccttggggacgatcagattcgccgcgccggccgcaccttcataggtctcctcctccttgccgcaggatgcgagcagctggggtacgaccagcgccgaagcgccggccgcagccattttcttcaggaattttctgcgtgtttccatctcttttcggggcgtttagtccaggaaccagaattcgtaggtggcgtagcggtaaccgcgtgccttgtagagcggcagcatgaagtcgcgaatgcggcggcgcagcgtgtcgatgtcggtcttttcgctgctccaggcgatctcggccgcagccgagagacgcggcagcagcatgtgctgcacgtggccgaagtcggcgatgtactcggtccagaggttggcctgcacgcccttgatatgcgcacgctcctcttcgttgagcccggcgaaggggtcgaacgagtagcatttttcgagcgtcagaccgctgtcgatggccagcggctcgccgtagacggcctggtcgcgcgtctgcgaatagtcgaggtagaggtactggtagggcaccatgatcgcgtcgttgccctgcttggctgccgcgatgccgccctcggcgccgcgccacgacatgaccgtcgccgtcggcgtcacgccgccttccagaatttcgtcccagccgatgatcttgcggcccttggcgttgaggtatttctcgatgcgggccaccaggtagctctgcagctgcgcttccttttcgagtccgagctccttcatgcgcttctggcagtggggacaggtcttccagctgtcgcgcggcgcttcgtcgccgccgatgtggatgtattcgcccgggaagaggtcgcagacttcgtccagaacgttctgcaggaattcgaacgtcgtctccttgcccacgcagaagatatccttgttcacgccccaactggtccatacctcgtaaccttcgccgcggcatccgagccacggatagctggccagtgccgctacggcgtggcccggcatctcgatctcggggatgatcgtgatctgacgctcggcggcataggccacgatgtcgcggatctcgtcctgcgtgtagtagccgccgtggggcgtgccgtcgtatttgcccgtgtgggcgtagaggtgtccgacgtaggtttcggggcgctgcgaaccgatgcgcgtcagctcgggatatttcttgatctcgatgcgccagccctgatcctcggtcagatgccagtggaaggtattgatcttatgggcgctgatgatgtcgatataggtcttcacctcgtcggtggtgaagaagtggcggccgcagtcgaggtgggcgccgcggtaggcgaagcgcggagcgtcctcgatgcgcagggccggaatgcgcatctgcgcggggttctcggtcgcggcgacgagcagctgttcgagggtctgcaggccccaccatacgcccttcaccgagccgcctgcgagcaggatctcctccttgtcggaggtgctgtcgagcgtgtatccctcttcggccagcgcggggtcgatgctcagcttcacggtggccttgcgcagcgatttggccgtgctcaggccggagaatccgtctcgttcgaggcggctgacgaacaagtcggccagacggagcaattccgcgtcgttgctgccgatgacgacactctgcggcagatcgatcgtgcgtccggtctcccggacgtttaccggtttgggaatgatgcccgtctgggcatggacacgttcttgcaggaggatgcctgccaggagcagtaaggttgccaatgcgatacgtttcatagctatggggtttttcgatttgggttttatatcggttgtatccggagttattccaactcccggaatgaaatggcgaatccgccgccgggggccaggtacattttcagccgggtgcggctgtcgaccttgcgacgggtgacggtgtatgcctgcgggttggtgcggtagtgggcatcgggggcgtcggcgtagatcgtcgcctcgtacttgcggcccttttcgagaaagtcgagggatacgtcgagcgtccgggcgttttcgtcggtcacgcctgcggcgaaccactgtccgctctgcttggcctgccgcgccacgacgatatagtcgcccggctcggccgccaggtagcggctgcggcgccagtctgcggctacgtccttgatgaactggaaggcatcgggatagcgcaggtagtgttcaggcagatcggcggccatctgcagcggcgaatacatcgtcaggtagagcgccagctggttggcgatcgtcgcgttgacgcacgaggggttcgcggggctgaattcggccatgcgcatgacgaagattccgggcgtgtagtccatcgggccgccgttgagccgcgtgaagggcaggatggtgacgtggtgaggccggatgccgccgaaggcctggtattcggtgcccttggccgactcgttgccgatcatgttgggataggtgcggcacagtccggtggggcgcacggcttcgtgggcgttgaccatgatcttatgctcggccgccttgcggatggcgtagaggtagtggttgttcatccactgtccgtagtggtgctcgccgcgggggaagatgctgccgacgtagccgctcttgacggcgtcgtagccgtggcgctccatcaggtcgtaggcccggtccatctgccgttcgtagttgcgtacggccgacgaggtttcgtggtgcatcatcagcctcacgcccttcgagcgggcgtattcgctcagtgccggaaggtcgaaatcgggatagggaatcacgaagtcgaaaacctcctccttgttgaagagctcccaatcctcccagccgatgttccagccctcgaccagtacttcgtcgaatccgtgctcggctgcgaagtcgatgtagcggcgcacgttggccgtgttggccgagtggcggggcgagggacggcaggccgtgtagtcggttttgcccggacgtacggacgtaacgtcctcggtgtaggcccacgatcccttgccgctgatcatctcccaccagacgccgacgtacttcaccggatggatccacgacgtgtcctcgtaggcgcacggatcgttgaggttcagtaccaagcgcgaggcgaggatgccgcaggcgtcgtccgccacctggatcgtccgccagggggtgtggcgcggcgtctgcatcgtgcccttccatcccgaggcgtcgggtgtgagcgaggcggtgaagaccagccgttcggggtcgatctccaggtgcatgcacgggtagtcgaccagcgccgcttcgtggaggttgatgtagagcccgtcgtcggtacgcatctgcaacgaggtctgcaccgcgttgacgctgtagggcgtgtggtagggattcgaggtcagagccgacggcagcagcgcgggaatttcggacagacgcgattcggtgtattcgtactcctgggtgtcgtagtcgcccggaatccagaaggccttgtggtcgcccgccatggcgaactgcgtgagctcctccttgatgatgaaatattcgaatccgcgcatggccgggaattcgtagcggaatcccagtccgtcgtcgtagagccggaagcggaccgacatcggacgcccggtgccccgctgccgcaggtcgaccaccagttcgttgtaatggttgcggatctcggcctcctcgccccatacgggctgccaggtctcgtccagagagctgcggcggttgtcggtcagttcgaaatcgtcgtgcagcgagacgctggggtgttcgtcgcgtttgcggatgacgccctgttcgatctcgatcttcgagacgttcagatcgccgcgcagttcgaatcccaggtcgctgggcaggatcacctgccggccgtcgtagtcgagtgcatagcggggcgttcccgtcggcgagagcgtgaaggtcatctgcagcctcccgtccggggagagcagccgttcctgcggctgggcgccgtgtgccgccgttgcgagaagcagtgcggccaaagccggaatcattcgcttcatgatggtcatcgtattatcggtagaggggtgaaatgacgaactcgaaggtgtaggcgtcggccggaatccggtactcgggacgcggcagcgatccgaacgagtcgatacatcccagaccgcgctgtacgaggtcgaagttcaggtgcgtcacgccgcgcgaacggtccgcttcgtgggctgcaggccgcagctcctcggagtgcgagtagcgcgaggatacggacgagagctcctcgctggcgaaaggcgacgaaaagtcggtcaggtcctggcgcgtgaaaggcagcgccgaggccgagaactgcgcgggcgaggtgatttccagtccgtagccgctgtcgtccgtcaggcggaaccatttcagtcccacgtgcgtacccgactcctgcgggtgtacgtatccgtagtggtattgctccgcgaccgactgcacgtagtggcccgttcgggcggaactctggcggtcggagtaggtctcgtaaggacctttgccgtagaaatccaccgtcgagtatcgacccgggagggtcgtctccatgcctacgcggaagaattcgggtgccgaggccatgtcgccgccgtcgaaggtgcggagcgttccgacgagcgtcccgtcggcgtggatgcgataacaggtttctacgcgaaccatgccgtagagcggttcgaataccgttttcacttcggcgtagtcatccgtcgtcgtgacttcgaacgattcgggtacgaattgaggagcgggccacagggccatctggcggctgaagatgcgggcgccggccggatggtactggaatccgacgtcgttgtccgtcacagcgcggctgaagcagggcagcagcggtgcggcgagcagttcgcgaccggccagacggtagctgctcagggcccccgtcgtgcggtcgaaagcgatcgcccaggggagctgcgcacgatcatccgtcgttcccgacaataccgtcgtcgcccccgtcatttcgacggcgggtgttcccggaacgatcttgcggccgtagcgcagcccctgtgcgatggcaatttggtcgtgcgccagctccgtaccggccggaagcagtccgtcgcggcttttgagcgtgtagcgtacgtcgaggaagatatccgatctttcgaggtcggggcaggctgccgccagctcctcgcgggtatatcccgggcgcagcgtcgcggtcgtctgcggagctacgtcgaggggcgccagggtacccgacaggacggactcgccgttgcaggtcacctcccactgcatcgcgtagcgcgagagatcggtaaagaaatattcgttgtagaccttcacccgtccttcgagcgcctcctcgggggtggcggaggtgcggatcgactgcaactgataggccacctcgtgggcatggggatgcagcgaccggtcgctggcgatgatgccgttgcagttgaacgatccgtcgctggggtcgtagtcgttgtagtcgccgccgaaggcgaagatatggtcggtgccgtaaatggcgggatcgaccggacggtagagcgcctgatcgacgaaatcccagatgcagcccccctggaaggcgggatatttgcgcacgaggtcccaatactctttgaacccgcccatcgaattgcccatcgcgtgggcgtattcgcacagaatcatcggccgcgagggattcgatgcggcgtattgctcgcatccttcgtagccgcggtacatcgggcagaagatgtcggtgttgcgctccagcacggcccgctcgtattgcacgggacgcgtcgggtcctcctgtttcaaccagtcgtaggccttttcgaagttggggccgttgcccgcttcgttacccagactccagacgatgatgctcgggtggttgcggtcgcgctgcaccatgcgcgtgacgcgctggagatgcgccgcttcgtaggcgggatccttggcaagcgtctgttcgtcgtaacccatgccgtgcgattcgatgttggcttcgtcgatcacgtaaaggccgtagcggtcgcagaggtcgtaccagcgcggatcgttggggtagtggcacgtgcgcacggtgttgatattgagccgcttcatgatttcgatatcgcggatcatctcctcctcggagaccacataaccgcggtaggggttcatttcgtggcggttcgcgcctttgatgagcaccggacgtccgttgaccagcagctgtccgccggagatgctaacgtcgcggaagccgatgtcgagcttcgtgcgctcggtgaccgatttcccgtccgacggggcgacctccatgcggtagagccgcggggtctcggccgaccagggttcgatgccgctcagcgatgccgtgccgccgaagcgcttcaggccgtcgcgcgtcgcgtcgcagacggtggcctgcgtcttgtatcccagctcggggatggagacctcgaccgatttcacgccccgggtcgtcacgacctcccagcgcagttcgcccgaggcggaggcctcgacgcggatatcctccacgtgctgcttttcgcgggccgtgaggtaggtctcgcgggccaggccgctcagacgccagaaatcctgatcttcaaggtaggagccgtcgcaccagcggaagatttcaagggcgatgcggttctcggcgcccggaacgaccagacgcgtgacgtcgaagcgggcttcgagcttgctgtcctcgctgtagcccgcctggcggccgttgatccagacacgcacgttcgaggtcgccgagccgatgtggagcacgatctgcttcccggaccacgaggccggaaggtcgaacgtgcgcacgtagtggcccacgcggttgtgctccgtggggacgtagggcgggttgttctcgtaatggccgcgccaggcgtagccgatgttcagatagaccggatcgccgaacccgttgagctcccacatgccgggaaccggcatttcgccccaggcggaggtatccgtatcgggtgcgtagaagtcgggcgtgcgctcgtcgggcgtttcgtagcctttgaatttccagagtccgtgcagcgacagacgcggcgcgtcggtgcggaatgtggcccgcatcggcaggcggttgtgttcgttgacggccggattctgccagtcggggtcggtttgtcgggcggcggcgtgcgctcccggggccggaatgccgagcagggcggctcctgcggcgattgtcgtcagaaagcgaagggagactttcatcgtcggtcggattgtacggttatttcttgatcttgacttttttgccggctacgacttcgcgcatgccgatcttttcgagcacctcgcgggcctgcatcgggttgtcggtcgtgagctggtcgacgcccatcttgaagagcgtctccatctgtgcgggatcgttgaccgtccaggtgttgatgctcatgcccagtttgcgtgcttcgggataccatgtcgcatcgtcgagcagcgtcttgaaccaggtgtccacgccgttcatacccatttcggctgcctgtgccggacggcggtcgctgcccagatactgcaccgtgaatcccggggccgactgtgccagcacgcggctggcgttgggcgagaacgagatgaagatcacgtgtttgggcgagaagagtttgtattttttcagtttctcgatgctcagtgcgatggcgcggttctcgatctcgtccgtcgagtgccatttcatctcgaagaccagcaccgttttggggtatttcttcgcctgagccaggtattgatcgagcgtcgggatcggttcgccgttctccagccggtagtccttgaactcggcgtagggggtctggtcgatgcgtttgccgtcgatatgtgcgtcatggaagatcagcagttcgccgtccgaggtcatgttgacgtcgaattcgctgccccagaaaccggctttctgggcgctttcgagtgcggccagcgagttgcgggcgtagccgccctccttgcagttccagtagccgcggtgggctacgatggcggactctttgggttgggcctgaacgaaggttacggtcgctgcggcgaatgcgacgctcagcagcgttttggcgatggatgcggttttcatatcggattacattttagaggctttgtaagtcatgttgatgatgcgggtgggttcgacggccgtgatgcggaacgtgggagcctgctcgatgaagtaggagctccaccacatcgaacgttcgccgtccgaggcgaattccgtgtggatgtagtcgcccatttcgacgcggattttcccttcgaagcggacatgcaggctgccgcccgagaggaactccgacggaagttcgacgccgggtgcgacgctctggccggcgtcgaggcagagcacggcctcgcgctcggtgccgtcggttcggaaatcgtcgaaacggaggtcggccgtcaggttgcacaggttgccgttgtcgatctcgttgatgtcccagcccgaggccgagaagtcgaagcccatgtcgagcagcttctggttgttctgcggcggttcgtagcatcctgcgtagccgacgtagcatccgacattgtgcacctcgcgggcgatcgtccgcagctgttcgtcggtgaaatctcttacgttgcccatgcagtagaggtagggtgcgcccatgtatttgcagcggtctacgatctgtcggatgctcttgtaggtgtggtattcgagaatggggcccgagaactcctcgcgcgtaccccagtagaggatgaaattctcgcccatgatcgagcggatgatgcgcacctgctcctcgtcgacgtgcgagatcatcggtgcgatgttgttgcggcggcattccagcaggaactcctccatcgaggtgatgtgcgtgcggtatttggcgtagcgcgagcggtagcggtatttgctcatcagcgtgtcgaagggcgtctggcggatcaccacgtcggcggccgaattgccgtcgaggtcggtgacctggtcgcccagacatcctctgacgccgtgcatgacgatgtatttgccgggtgtcgccgtggcgtggacgttggcttcgatgaacttgaagcccaggcgcgcggcgatctgcacgtcgaagaccgactggcaggggatgatcggatcgctcttggcgtagatcttgtcgatgaacaggtggctgtaatagggaccgccgaaccggaaggtccagttggcgttcacggcgctcgacgtattcatgcggatgcgctgttcgacggcgggtgcgagcccggaggcggtctgcgccgaggtcgtgatcgtcgccgtcacggctgccgtcgtcagggcgacgagcggcagcatgcggcggatatgtgcgaaaggtttcatcgttcgggtcaatgttcgttcggagtcggggagtcggttaacgtttttcggcgttctgctgcgtgcggcaggggcgcttcgacacgaagtcgcagaaatcctggtagagttcctgatcttcggggtcgtccgagcggcggagtgcagtcacggcgctgccgccctggtagtaggccagtttgcagcgctcccatacgcccgtctcgcggaaggcccgcatgtagtcgcgcagacgccctccgcggccgtgcttcttgagcgccgactcgtcgaattcgacctccatgtccatgccgttggcctgggcctcggcgcaggcgaccttcagccgctcgtagggaatctcgttgtggaagaagtggttgggctggtagtaggcgcgggcgaatcccttctccttccagctttcgaagccgggggcgtggaagtagggtatccagtagaggtcgtaacgcttctgggcgcagtagtcgacgatgtttccgatgagcggactcttggccgaggtctcctcggtcacccagtagaatccggccagttcgacatgccggaacttggcctgcttgaagcggctcagcacttggtcgatataccagcggcaggccagtgcgcggtcggcttcgtccgaaaagtccaatacgcggttgtcgatgacgccccagtaggtcgtgccgcccttttgggcgatcggctgcttgtagacgatcgggttggggatcgagacgacgatctgccgtttcgagggcggaacgccgagcgtctgcgacgcctcctcgacggaacgttcgatggcgtcgatcacctggccttcggagaagtagtagtcgatcagtttgagccaatcggcctgcgtggcggccgggaggatcgaaccgtcttcgttcttgtgtcccgggtcgaaggccacttcggcgctgccggggccgatatcgcggatttcgagcagcaggaacccgtcgaagagccagtgcgccttgccgtcgcggtcggtgtaggagacgtagtctttcatgcggtcgacgctccagttgcggttgcgggcgcctccggcatagatcaacaccatgtccgaggccgtgcaggttttggttttgcgggcggtctgtgccgaggtcggcagcacgcaggccagtgccgccagtgataacaggatgtgtcggatgggtttcatgagctttcgttattttttgcggaagaatccgatggtggactttacggcgcggttttcgtccgaatggtagttgacgtgctgcgtgccgaccatcatgccggtcgaaccgccgccgtcgagattcagggcgtccgtacagccgatgccgcgcaggatgcgggccagctgggtgagcgtcgccccgccgctggccgcgatacggccgtcgcagatgaacagcacgacgcgtccgtctgccaggtgtcctacggccgtgcggtcgggcgaaaccgtcgggccgaagatgtcgtaggggatgatttcgtagttgttcaggtagtattccgtgcccttctccgtcagggtgaaatcgaacggacacttgccgtccttgagcagcacgggacccgcgctgatggcgtagtggggcgaccagccgaggggtttggccgggttggacgtcgagacgcccgcgtatttcgcttcgccgcgcacggagggcagcggtcggtcgtagtagtagttcgaaccgttggttccggtccagtaaacaccgggtttgccgtcggcgccgactccgaagatgccgcgcgtggcgtggtacatcacctgatactcggcgtcctgcgtgcggagcgaaccgcgcatgtcggggatgtaaccgatcgagcgcgaatcgacgacggcgatgcccacgtggtccgacgagtagaagtatccggcgttggtcatcacgtagcagtcgccgccgaacgaggcggactgcttgtcgatggtggccttggcgtcgggaacgcttacgcgcagttcgaccgatcccgtgacgtcggccacggcataccaggcgtggaaattgtgtccgccgaccttgtcggtcgtctcgtagaccgagatttcggacggaagcgtcggcatgtcgagttttttccaagtcagtttgatcgcttcgggctccgtgccgagcgatgcgacgatctcgtcgctgtagtaggtcttgttgtcggcccgtacgtaggcgcggaaacgatacggccggccgtattcgagcagtacgttcgagatcacctgcatgacgggctgcgtgccgtcgagtgccgggccgtcctgccgcatgtcctcgacggtgggcgtatggtcggcgctccagcagatgccgcacgagacgttgcgcgcctgggccgtattgcggggtgcgtaacggaaggcgatgcacgattcggtcgcggtgctctcgcccacgaaggcgatgccgggcgaggtgaggtcctccaattcgagggccggggcgtagacgatctccgacgaacccttgcgaccgtcggcgcagacgccgaaacggtaggttttgtccagttcgagaccgctgtcgaccgtgtagctctccacgttgcgggccgtgaatccgattttgcagggcgaagtctcgtcgccggtgcgcatccagaccgtgaatccgttctccgaatcgctcttgtcgtgccacgtgacgcggactttcgtgtcgccgatccgttcggccgcgacatcggacggaggcgtcagcgtcgattggggcgtctgcccgccctccgattccgagcaggcggcgagcatcgccgtggccagaaccgtgaataagagccgtcgtatcatctttttcgcttgtttttgaatgaaattctttcttgtcgatttacggaaggaataaccgacccgtacagccggttactccttttcccgaatattttgtcggcgaaccgattattcgtaggctacgagcgtcgcttcgctgagcgtcatccagtggatacgtcccgtccaccattggttaagctcggttttgccaacggcataaccgttcttctgcatcttgaagcggtagtagcgggctacgatctcgttatcctcggggataacgaccgtgataccgtcggccagcagcgcagagtaggctcctgctgcgacccctttcatatcttcatagagatgcgaggcgtctacgctgccgagtttcacccacttgtcccaggctgcttcgggctctccgtcgccggtgtaagcgtagatctcgtatgccagcgggtcgttgttcgcccagctccagtagggatagctgatgaagcgagccagacgaatggcttcaccggcgtcgatcgtgaacgagtcgccgtgtcctgcattgaacgaatctacggtagtattgatctcccagtgcttgtagttgaagtcggccccttcgatgttgcacaggtggtagttacccttgttggtctgccacatgccgtcgaacaggtaggcactgccgtggttcttttcggccgtattttctgtgccgtcgttctccagcgtgaaggcgcgcatcttcgacttgtcgggcagatacgtggaagcctcgaacgagatgggctgtacctccatcgagaacgtcaggttggcgtacgaaggcgacgagaaagtgatcttggccttcttgttcgcgttgacgaggttggtcggaatcatgtcgaagatgatctccgtagccgttttcgatgcctcgcgcatccatgcgccgtcggtgatcgtgtaggtccagtcgtcgatgttcgaggtgaccttcacggtgtactgttcgccgcgttttaccgttacggactcttcgcccgaagcggtcagttcggcgaagttgagcggacgtacctcgacggtcttttcgaagacggggtcggagggcgacgtgaaggtgatcttggccgtgacgttcgtgtcgaacttcaccgaaggatcgaggtcgaagacgagttcctcctccgatttcgaagcctccttgagccatgcgccgtcggcgagcgtatagacccagtcctcgacgttagccgcgatcttgagggtcagctgctcgcccttcttcaccaggacggtctgtgccgccgtgatatccatttcggctacgtaggcgggctgcgatacgggaacgcgctcgatcgagccgtcggccgaagtgaactccagcgtcgaggtgcgctcggcacccgttacgttgcggtcgacaccgagtttgagcgtcgttttgccgcttccgtgcttgggcgtaattttgaaccagggatcggaaacggtgagggtccagttcgaattcgagttcaccacgaagtcgatgatgcttgcgtccgccgaaagctcgatcgattcgggaacgcctatgtaggccgcctcgtcgttctcgcatgccgtgacgcagagcgctgcgatggccagcagaagcattttgaaggttttcatagtgtatcaggtgtttttttattcgttgtaaatttcttttgccgctcggcgatgatcttcgccaggcgctcgtaaaaggcccgttcttcggtgatgccgttcttccagtattcgaacgaggtgccgccgtagtaggccagattcgatttttcgagaattccgagctcttcgtagacgtcgatgtaggccacgttgcgctcgaatgcgtaattcgagtcgaactccacctccagccccatgtcggccgacagcgcttcggcgcaggcgtcgtagagccgctgccggggaatcgtggtgctgaagcagtagttgggctggtagtaggcgtagtcgaaaccgtattttttccagtcggcatggccgaaggcgccgtagtagggaatccagcggtagtcgaggttcttcgagtggatgtattcggcgacctgcttcatgtaggtcgagatgaatcctccgtgctcggggaaccagtagatgccggcgagctggatgttgcggaagtcgtgttgtgcgaatttctcgacgaccatgtcgacataccatttgcaggcggctatgcggtccggatagttgctgaaatccatcgctttgccgtcgatctcgccccagtcggtctgaccctcctgcggttcgggcatgaagatcacgaccttgcggcggtggaacgtacctccgatctggtcccgcaacgctccgacggctctgtcgagcgccgggatcgagtgcgtatcttcgaggtagaaatccacgatggcttcccagtcctgcttgttcgaagccgggcggttgagtcctccgctgaatgatttgcctccgcggtgtgccgtcagaaacagatatccgtcgaagagccattgcggagcgtcgtcgtccgaagccgcgtatttggcgaaacgcttgtcgtcgaatgcgcgtccgtcgtcgtatccgtcgtagatcagcatcaggtcgcggatcggcgcccggccgatcgtctcgccgaaattctgacgtacgggaatctccacccggaccttcggatcggtcgtcgtgaagacgatcgtgccgctgcggacctcgcggcccgtgttcacctcgatggctacttcggctgtcgccgcggaggtcgcttcgacatggagccacgcggcggcattgcctgccgaaacctcccatttgacgttgctgcgaacgacgagcgtctgcgcgaaggcggcgaacgactgttcgtacgactcgaccggggcgccgttgcgcgtcgttacggtgaggtagttctcctcttcgacgggcttttcgggctcgggctttccgggctgaggattttcctcgcccgagtgtccgcatgcgctcagcagaacgcatgcgaacatcatcgaacgtgctatgatctgtttcggaatcatcgtgtagtcgctactcttccgtattgtatctccagagctctacttccgagagcgcgaagtagttgatacgtcccgaccagtattggttcatggccgtaccgaaggccgcatagaagttcttcagcatcttgaagcggtagtagcgggcctcgggcagttcgccgtatttgaattccacgaccgtaccgttgaccgtgaggtcgttttccgaacctgcttcggcgttcttggtgatctgccacttgtcggagtcgtccacttcgagaatcttctcccagttggtccattcgccggtctgtgcgggttcgcccgaaagcgtgtaggcatagagctcgtaaacggccggctgctggttctcgtagggccagtaaggccagaagacgatcttcgaaaggcgcatcggctcgcccgcgtcgaacgtgaaggagttgccgcgttcgggggtcttgctcggatttgccatcatccagccgaagtggttataggccacttcgccgtaagcgcccttcttcgacatgtgcttgccgtcgaagcaacggctgggatcgacctccttggtccgttgatagtcggcgtccgtgtcgagctgcaggaccgtgcactgcgtgtggtcgacctgcataatctgggcgcgcgaggcggcgatcgtgtaggtgaagtcctcttcgaggttattcatcacgaacgaatagggagccgacaggttgagtttctgcccctcttccggtgcgccctccttgcggatggcgcgggtggcgtattcgagcgttacggcgacgtcggagaagttcgaattgttgacgaatacgaactgtatctcgtgggtcgcgttgtcgaccgtgccgacgaccgtctccgaaccgcaggtggccgtagccgacttcaccagggtcgaaagggcgtgcgtggggatgaattccgagaattcagcatcggtattgcaggaggtaaccataccggctgcaagaatgatgaatgacaatattctgtttttcattgctttgtcgtgttaaaaaccattaccatccggggttctggaccagagcggggctcttgtcggtctcgctctgcgggatggggaacaaatagtaggctttcttgaatacgcgctgctcgaaagcgacgggctcgtagaactcggtcgacttgaagttgttggtcttcgggtcgccgccgcgaacggagaggccccatacggaacctgcatcgccgtatttgtcggtgcgggctttggctacggtctccgagagcagacgacggcgcgtggtgtagtagcggtcgccctcgaagttgagctcgatctgacgctcgcgcaggatgtactcgcgctgatccttctgtttgcccttgatgtcgggataggtcgcgaagatgctcggcagaccggcgcgcttgcggatgtcgtcccagtacttctggatgtcggggttggtcggatcgtactcgttcagagcctcgatgtagtcgagcaggatctgcgcgtagcggatgtagatcgatacgtattttccgggcagcgtcatacgcgtgtagaagtcggcttcggcaacgacgcgcttctgggtgaggaagcccgtcatcgagtagttgagactctgacctgagttggacttaccgccgaagtagagctcgcaacggccccagccgtcctgttgcgaagcgtacatgttgaatccgttgcggtgacctgcgtcgtccgaataagggagctgtacgcggtggttgtagttgatcgaggcgtagaaacgcggctcgcggttgcagaacatgttccagtcgccctcggcatgcccccaggcgtcgaggttcttcaggtcgcggatctgcgtcttgcggccggcttcggtcttcatatccacgccgctgaagttgtagtgttcgccgtccttggtggcgaaaccgcgctcgatgtaacccgagttgggatcttcgatcgtgcggccgttctccatgtagaaggcgtcgaccagacgcagcgtgggacctacggcacccatacaggtggccgaaccggcaccctcgggaatcgtgtggaccatccaggcgtaacgctcgccgtggttatcccacgagatggtgccctggtcgatcgaaccgaagatgatctccgagttccagccgttgttgaagaggttgtagtaggatttgtaggggttgaaatccttcgaatccacgcctacgtcgccgttggtgtagagcttgatgttggtagcctcggccttgtcgatcacggcccggtatgcttcggcggccgtctcccaacgcttcgaatcggcggtggtgctggccagatgcgtgccgtcgtggttcacgaagtcggcgtagtcggggttgccgttccactggggcgaagcctgcagcatgagcatcatggccttgacggagagcgctgcggctgccgtcgcgcggcccaggttgtccgcctcggaggcgtaggagtcgggcagcagccgttcggcgcggtccatcagttcgcagacgtaggcggcgcactcgtcgaacggcgagcggggcatgttgccgaagtcggtgtcgttgctcatctgctgtttgatcagcacgaccgggccgtactggcgcagcagcaggaagtagtagtaaccgcgcaggaagagcgcttcgcccaggtagcggtccttgaggtcctgcgacaggttgccgcatttacccacgttgttttcgaaaacgaacgtcgcacggatggtccggtagaaggtgttccatttgacatagaaagatgtcgaaggctcccagacaccgaggttgatgttgtaggtcgggtatacggaccacggaatgtcgcactcgtcggcgcatcccagccaggggtcgtcctggtgcaaacggtccatgggcagcgacgcgtagcagttcgtgagatacttcacgacctcggcgcggttgctccagaccattttgtcggtcttcatgtcgtcgggttctttgtcgagatactcgcaacccgcgaacattgcagtagctataagcagataaaatatttttttcatcgttcgtcggttttagattagaaggagattctcacgccgaggttgaacttgcgggccagcgggtagttgctaccgttggtcgagccgctctcgggatcccacatgtcccagggcgagaagagcagcaggttgctgcctacgaagtagacgcgcagcgactggcatccccacgacttgaggtgcttgccccggaaggtgtaacccacttcgaggtccgaaagacgcagcaggctgccgtcgtagatcgtacgcgtggaggccttctggttgttggccgaggcgcttgccgacagacgcggatagaacgcgttggggttgggattctcctccgaccagcggtccatcgccttggcgaagaggttgcccttgcccacgccgttggcgaaggggaagaacgatcctccgagcgagtagctgacgtgtgcctgaccgcggaagaaggcgccgaaatcgagacccttccagttgatctgcagaccgaaaccgtagttgatttccggaacgcgcgaatagccgatggccacttcgtcgtgtgcgtcgaccacgccgtcgccgttgtagtcgaggtatttcacgtcacccggacgtaccgtaccgaatttctgctcggggctcaggtcgatttcgtcctggtcttcgaacagacctagggcgatcagaccgaactgctggttgagcgggtgtcccgtgcgcatgcgccagggatcggtcggagcctcgtccttctcggtgatcttgttgcgggcgaaggagaagttaccgtagatgcggtagttgaccttgccgatatggtggttgaattcggccgtagcctcgaaaccgtggttggtcatgcgacccatgttggccagcggctgctggttaagaccggcgatgcccggaaccgacgaacgctggatgaggatatcccaacgcttctcgtggaagtagtccagatcgatcgataccatcgagtcgaacatcttcagctccagaccgaggtccttcttgagacccttctcccaggtcagacccagaacgccttcctgtgcctcgccgatacctgcggaccacgtggcgttgggaccgaagtagtggcctcccagacccgattcccaggtgctcaggtaggcgaaacgacctgcggccagtacgtcggaaccgaccagaccgatcgatccgcggatcttcaggtggttgatccacttcaccttccagaagggctcgttcgaaatcaggtaaccgatggcacctgcggggaatacgccgaagcgctcgcccgacttgaagttctccgaaccgttgtaacccatgttgtactcgatgaagtagcggtcgtcgtaagaataggtggcgcggaatgccagaccctgcttgcgatagggcagtgcgaggatcgagctgccggcggccaggttgttgaagctgcgctggtagtacatggccatggcgcctacgcggtgccgctcgttgaagacgcgctcgtagttgaactgcgccttgaactcgtcggcacggtcgcccgtgttgctgtagatgtaaccgaggaactcgtcgccttcgcgcttgggaacgagcgagtagagacccgtctcgtcgtcgacgccgttcacggcgtagagcgacgaatacttgccgcgcgactggatcgaaacggtgttgacgtcgtaggagaacgatgccgtgaagtcgaggcccttggtcaggaagtccagattctgcttgagaatgatctggctcatgaccgacgtgcggtaggtcttgttgtaacccgaaccgaagagtcgctcggcggggttacccacgctggtcgacagcggcgcaccccagccccactgcatctcgccgaattcgttgtaaccgagcggaacgcgaacgggcgtggtgatggggtcctgctgataacatgccgagaagagctcggaggcctgcgactggaaattgtagctggaggtgatcggacgcggctggtgggcgtcggtcatgttggcaccgatttcgagcgacagggtcgtcgtcttggtgagcgacatgtcgatgttcgagcggaagttgtagcgcgtgatgttgatgttggtgttgtaatccgtgtcgggattgttgtagaggttaccgttgtcgcgcaggtagcttgccgtcacgtagtagcgggcgcgctcgccaccgccgcgtacgttgaccgaaacctgcgagttggtggagaatttcgtgaagagctcgtcgaaccagttgacattgggatagaggtagggatcggcatgggtttcggtcatgcggatctgctcgggcgaatagaattcgctgccgtaggcctcgttgtagaggcgcatgtagttggcgccgtcgagcagtttgggcatgttcaccaggttcgatataccgctctcgatcttcacgtcgatggtcgccttctgggcgatacccttgcgcgtggtcacgagcacgacgccgttggcggcacgtacgccgtaaacggccgtcgccgatgcgtccttgagcaccgagatggtctcgatctcctcgatcgacaggtcggacatcgaacgctccacaccgtccaccagtaccagcggggcgctcgaattgagcgacgagataccgcggatccagaattcggcgttgtccagacccggctcgcccgtacgctgcacgaccaccgcaccggcgatcttaccggccagggcgttcgtgaggttgcgctgcgggattttcagggcgtcgcgtgaaacggacgaaatggcgccgatcacgctggccttacgctggtgacccatacctacgaccactgcggcatccatttcgagcgtatcctcttccatgtagatatcgaggctgagcgacttgggcacgacagccgtctggggcttgtaacccagacaggtgaaggtcaggtgaacgcctacgttgggaacgtcgatcacgtagtaaccgttgccgtcggtaacggtacccgtcttggtttcatcgatgataacggcgacgcccgctaccggctgaccattgggatcgatgacttttcctttggcgatcaatctctcggcacgagccggagctgcactgtacgcattcgactccgatgcttcgtcagcggcgaacgcaaacgaaggaaccgatagcgtaatggccaggagaagtgcgaacaagcgccgctccccccccccctcaagaatcggaagcaaagatttgtcataagttcttcatacatttaataattaggaatttaggtggtattgagctctcgtggggacgaatctcaactatttcgttatgaagaacaaattaatagagattttttcaatttgtacctattgtcggaatataaaatgaattaaaaaatgaagtttttttattgtcgaaccgccgttgtggctgtatccggagatttaattcattgtgtaatatcgtgttatttgttgtatgtgtgtgcggtaatttgtaaagcgcgtttgttaaattaagtgtgtatttgtaaatttgtgtttataataagcgctaaattgtttgtattccgtgtgataatttgtatatttgtcaacagaatccgtctattttgcgtagttatgttcgatcctttcgcctttgaacccccttcggccgagttcgctcgggctgtgaaggtctcgattttaaaaagcatattcattaaaaaggaatttacgattcccgacatcgcgcaggccacgaatttcagcgtcacgaccgtggccaaacatgtcgccgaactgcaggagaaaaatttgctcgaactggtcgaccgcgtcaagaccaacaaacggggacgccgtccggcgctctatcgggtcaagtccgaggcctgcagcttcctgggggtggatatcaagtcgcacggactcgccatcggcctgatggacctttcgggcgaaatggtgcggatggagcagatctcggatttctatttcgagaatacgcacaacaagctggatgaaatctgcaaccacatccagcgtttcatcgtgcgggccgagaccgaattgccgggtaaggtcgtctgcgccaacttcaatatcggcggacgggtcaactcgcggacgggtacgagcgcttcggtcttcaatttcgaggagacgcgcgacatgccgctgaccgatctgctgagcgagcggctgaaaatcccggtgttcatcgagaacgacaccaaggcgatggcctacggcgagtatgcctccaaggagcgttcgggatacgagaacgtgatctacgtcaatgtcgggtggggcctcgggctgtgcctgatcgtcaacggcgagatctactacggcaaggacggctattcgggcgaattcggccacgtacacatgtacaacaacaatatcatgtgccactgcggcaagaaggggtgcatcgagaccgaactttcgggcagcgccatctgccgcaagctcatcgagcgtatccataaccacgaggcgtcggtcctttcgcgcaaggtctggggcggcaacgttattacgatcgccgacatcatcgccgccgccgagcaggaggatccgctgtgcatcgaactcgtctcgcaggtcggcagcgagctgggtcaccagctggccggactcatcaatctgctgaatcccgattgtatcgtcatcggcggaaagatcgccgaggtggcgccttattacttcctgcagcctgtgacgctggccattcacaaatattcgctccggctgatgaaccagcatctttcgatcctgccttcgcggctggggcagcatgccggaatcgtcggggcctgcatgctggcgcgcaaacggttggtttgggaccggctgttgggcacggaatagatgcgcggaagcgttgtcgctacgccagcgccttgtactgcgagggcgacatgccggtcaggcgtttgaagtagcatccgaaaaacgactggttcgggaaattgagttggtaggagatctcctgcacgctcatgttcgtatatttcaacagcgattgggcttcgagcaggacaaaatggtcgatccagtccgatacgggtttgccgctgatgcacttgatgatcgttgtgaggtatttgggcgtgatgcagaggctgtgggcgtagaaattcacgctgcgctcctttttgtagtggtcgctcagcaactccaggaattgccggaaataggcttcattgcggttttgcatccgggcctccggttcggggtgttccgcgagataggtctggaacaggttgccgactttgtggatcgtcgcggcgatcagttcgctgacgatgtcgcgggagaattgcagttcgggctcctgaagctcggtgtcgatcagacggatgtaatcgccgagcgattcgccctccgcgctccgcaactcgatgcaggggtggtcggccagttgcaggaacagttgcaggatgcgtttggtgtccagggtgagccgtcgcatgaattcggaggagaaggccagaatacgggctttgaagcgtttgtccgaccgggcctgcatgacgcagcgcggtccgaatatgaacatcgtattgcgcgtgatccgatattcgcgcatgttgagcgaaacggtcgtttcgccctgggtgcagaccccgatgatgaatgcgtcgatccgtcccaggaaggttgcaatttggtcttattcagttcgtcaatcagcgtcagatattcctcgattctttgtttctgcatcttatttctgcggcagaagatatatataatgccgcagatcgctatgactgaaaccaaagcgataatataaattacattttgtcttacactggagcgatagcgttcaaattccaagcgttcgtttttatatcgcagttcggtttcagccgcagaattattcatatagcttaaatgtatcgaatcacataaagcaagacactccttttgcatcaagtaggccgctcggtaatctgcattcaacgtataggtttcggcaaggagaattttagctgccgcatcgttttcgcgcggccccccaatattggctgaaatcgctgcgttcaaataatattcggcgctatccggtttattaatacgcaaataatattctcccaaaacacagcaatcattcggcgataaattatccgacaactggagaaaacgacctacataatcgtaggtttcgttggttacgcctttgttcgaaagaatcccgattagacaacgcaggcagtacacctgaaaatcctcatacccgaattgttcggatagattcaatgcttcccgataatcccggagcgcgttatcgtcatcgttctccatgtagtaaacagcggcaatggcagttttagcgctgacttggtgtttggtcttatttgcggcctgatagttttcgtaggcttcttgataataaaacaaagccctttgataattattctgcttcaaattcaattctcctaacacgaagttacatactccgattaggtaaggatcatctattatatcccgatactccaacgctttaagatatgattcggttgctttctgataattatttgtgctgtattccatgcgccccagacaataccaagaaaggaacttttgtcggttcgtgcctttgcgcatgaaatagtttactgcaggacggagcatcgaatcggtatctatggtttgtcctgttttatccaacgccagcgaataaagcagcccataatgtgctttagtcgattttttgcgaatactgccggggacgatagcttgcaaggagtgtaacgcactgtctgggtaatcgttaattatttcctgcgtgcgttctagttcttcggctatgtatttgctctcggaacatgaacacaagcatagaaaaaaggcgcaaacataaataaatcgtttcataaacagcccaaataattattatccaatatacgaaaaaataccgatttaacttatatctgacaaaattaacatggcataatattgaaggttccggaaaagatataaattcgcgagacctatgctttacgttaggccctttcttcttgcttttgaacttaaatcataaagaggtgaatccatccgttttgttttcgacgcactgtttgatttgccaattccaaaaacttttcgtatcttgcaaatagttatttgaaatgcggtatttgagcgcaatcaactgaaaataaaccgttgccttctcgttacctattatcctatacaaaaatgtaacgactcattaattaagtcgttacatcattataaacccacacccacttcgggtccggtctttttgggctcgaatcgtcaggtgtgtgcgcacacacttgctattttcgaaaattttgcatagctttgccgatgtaacgccgaagaacagcgcaaaccatgtccgacaacgaacatatcacggtccgcatcgtcgacatcgcccgcatggcgggggtgtcggtggcgacggtcgaccgcgtgatccacaaccgcggcaaggtctcggaggagaacctcgcgcgcatcaatgaggtgctgcggcgggtcgactaccgtcccaacctgatcgcccgctcgctggcgtcgggccgcaggtacacgctctgcgcggtcatgccccgtttcgccccgggagagtactgggccgatttcgaggccggaatcgcccgcgccgaggccgaggccgtgcgttacaacgtcacggtccgccgtttctgcttcgaccagtacgaccgttcgtcgttcgaaagcctgctggagacgctgcgccgcgaggagttcgacggcgcggtgatcgccacgctcttcgcggagatggtcgagccgttcacccgcgaactcgacgcccggggggtgccctatgtcttcgtcgattcggacattcccgcctgcaaccggctggcctatttcggcacgtcgtcgttcgacgccggggcggtcgccgcacggctgctgttcgaccgcctcgatccgggagcggacatcgtcgtgggccggatcgttcaccggggcgacgccggttcgaaccagtggcgcaaccgcgaggcgggattccgcagttacctcgaagcgcatgccttccggggccggctgcactacgccgcgctgcggctggacgacgaagcctgcaacggccgcgtgctggatgagatgttccgcgaaaatccgtcgattgccggggccgtgaccttcaattcgacgtgttacatccttgcgggctatctggcggcgcggcggcgcgatggcgtgcggctggtgggctacgacgtgatccgccgcaacggggagatgctctccgcgggcgtggtgacggcgctcgtcgcccagcgtcccgaggcgcagggctaccgcgcggtgatggccctgtgcgaatggctcgtcgagggccgcgctccgtcgaaggtcaacaacatgcccatcgacatcctgctgaaagagaatataccgtattataaaaacaacatcatctgaaaaacatgaaaaatctctttgacatccggggccgtgtcgtcgttgtgacgggtggggccgggattctgggccgctcgatctgcgcttacctcgccgggcagggcgcacgcgtcgctgtgctcgaccgcgatgaaaaggcgggcgaagcgcttgtcggcgaaatccgcgctgcgggcggcgatgcgctcttcttcgcgaccgacgtgctgaaccgcgaggtgctcgtgtcgaaccgcgaggcgattctcggggcctgggggcagatcgacatcctgctgaacgccgcgggcggcaacatgggcggtgcgacgatcgctcccgacaagtcgttcctcgacctggagatcgaagctttccgcaaggtcgtggacctcaatctgttcggcacggtgctgcccacgacggtcttcggcgaggccatgacggcccgcaggaagggcgtgatcgtcaacttctgctccgaatcggcgttgcgtccgctgacccgcgtggtgggctacggagccgccaaggccgccatcgccaactacacgaagtacatggccgccgaactggccatgaagttcagccccgagatgcgcgtcaacgccatcgtcccgggctttctgctgacgaaccagaaccgcgcgctgctgaccaacgaggacggttcgtacaccgaccgtgcgcggacgatcatcgcccacacgcccgccggacgcttcgccgagccggaggagctgctgggtacgatccactacctcgtcagcgacgcttcgtcgttcgtgacgggcgcgctggccgtcgtcgacggcgggttcgacgctttctcgatttgatccgccgcgggagccgtctcttcggcggggtctgacgggcacggcatcgggccgggattgttcgcggccagcggcaacgtgcaggaggtgcaaccgccgcattctcgcttgcagcggagaaaggacaaccgcggtcttcgcccgcggggtactttgtactttttggccgcaaaaagtaccaaaaactccccggcagatgccttcgcctacttcgtcccgtctaacgttcgaaacgggcgcctattcgcgggtttgcaagcaaaccggccccgtttcttgccacttttagccgggacttcgtttcacggctccggcatcgggccgggatcgttcgcggcaattccgtcttttcggccgggtaaagaagcgaacacgcgaacatgcgaacatgcgaacaggggcgaacatctcttgttcgcgtgttcgcggagaatcccggcatcaccccgggaagcggttttaaaccgccgcattctcgcttgcagcggagaaagaacaaccgacagcccgcgtgcccggagcgggaggctgcatagtcttgttcttgctgcgcccgctcaacgcgggccggaggttgttcccgcgaaagcgacatgcggatggttttggtacttttaacttcgctacgctcgttttcctccttctggcacggcatagcccgcaagcggtctctgctcgtgctgcgtgcgtcggttgccatcaaaagtacagagaaagccgcgacgatgtcgcgggtgttttgtaccttttttccgcaaaaagtaccgatcgcagtctgcgactggtgttgtttgccgctttttggtcggctgttaaccgcggtcttcgcccgcggggtactttgtactttttggccgcaaaaagtaccaaaaactccccggcagatgcctgcgcctacttcgtcccgtctaacgctggctccgggcgactattcgcgggggcgcacgtgccccgtccccttcgctcgcgcttttagccgggccttcgtttcacggctccggcatcgggccgggatcgttcgcggcaattccgtcttttcggccgggaaaagaagcgaacacgcgaacatgcgaacaggggcgaacatctcttgttcgcttgttcgcggagaatcccggcatcgcccctggaagcggttttaaaccgccgcattctcgcttgcagcggagaaagcaccgtatgtgaaaaatttgaaaacctaaaaacaatacatccatgtatctttgcaaacaatcctggcgctggtacggtccgaacgaccccgtaagccttcaggacatccgtcaggccggggccaccgacatcgtgaccgccctccatcacattcccaacggcgaggtgtggaccgtcggggagatcgaaaaacgccgaaagacggtcgccgacgcgggccttcgctggtcggtcgtggagagcgtccccgtccacgagcatatcaagacccgcacgggcgatttcgagcgctatatcgagaattacaaacagtcggtccgcaatctggccgaatgcggcgttaaagtaattacctacaactttatgcccgtgctggactggacgcgcacgaacctcgcctacgagttgcccgacgggtcgcgcgccctgcgcttcgagcgtgcggcgttcgtggccttcgatctcttcatcctgaagcgtcccggcgcggagaaggactattccgaggccgagcgcgccgctgccgaggcccgcttcgggcggatggacgccgcggaaaaagagctgatcacccgcaacatgatcgcgggcctgcccggctcggaggagagtttcacgctggagcagttccagcgggagctggaccgttacaaggatgtcacggccgagacgctgcgcgcgaacctcgtggcgttcctgcgcgaggtggctcccgtggccgacgaggcgggtgcggtgctggcgatccatcccgacgatcctccgttcccgatcctcggtctgccccgcattctctccaccgaatccgactttcagaaattggtcgaggcggtccccaacccttcgaacgggctgtgcctctgcacgggttcgttcggagtgtcggccgcgaacgacctgccgggaatgatgctgcggcagggcgaccgggtgaatttcgtccacctgcgctcgacgcagcgcgatgccgagggcaacttctacgaggccaaccatttggagggcgacgtgccgatgtacgacgtgatgaaagccctgctggagattcagcagcgccgacgcatctcgatcccgatgcgtccggaccacggccaccagatgatcgacgacctgaagaagaagaccaatccgggatattcgtgtctgggccgcctgcgcgggctggccgaactgcggggactggagctgggcatcgcccggtcgctgtttgccgataaatagggcagtcttgcacatgacgaatcggtgcgcctcgtgaggggcgcaccgattgtgtcagaacgggttccggagctattttttggccggggccgccggggtctgctgtccggcagcggttttcggggccgccggggtctgcgccgtggccgccgtggtcgccggaacggtctcgatcacgtccacctcggtcaccacccagctgaaaaggtcgttcgcacactggctctccagccggcggatctgcgacatgtcgctcgtgtcggccagaatggcgttgaagaactggtccatcgtggcgtacgtcgcattgaccttcgccgcgaagcagttgtaaaaggctttctgctgctcgtggtcaagccctgcgggcagcacgccctgcgctacgaggtagttgtaggggtagatgtgccgcatgttgcgggcgtcggcgttcagttcgtcgacgatcgtcgagacgaccaccatgtccaccgtgtcgtcgacgccctgcatctggacgaactccatgtagacgggataactgttttcgagctgcccggccacttcgtcggagaagagcacgaactcggcgtcgttcaggtcgtcgaggtacaccatctggcggtagctgcgcagcgcttcgcgcatcgccttgcgctgttcgtggttccattgccgctgctgcgagcagccgaaaaatcctgccgcgaagattgccagcagaggtacacagaggagaatttttttcattttttaccctgattttggttttacttcatttcggaacgcaatagatgtgccaaaaaaatcatatctttgaggaaaagaacccgttatggatgttttgagtttccgcgactactgcctgtcgctgcccctcacggaggaatcgacgccgttcgacgagacgacgctggtctacaagatcggcgggaagatgtacgcctgcgcggatatgaacgatttcgggcaggtggccgtgaagtgcgaccccgacgaggcggtccggctgcgcgagcggtacgaggagatcggcccggcctaccatttcaacaagacgcactggaacggcatccgcactgcgggcgacctgcccgacgccttcatccgcgagcagatacgcaactcctacctgctggtcgtgcggcgcagcgtcacgccccggagcctgcgcgaggagattctgcgtcatgtcgaagagcacgggctgccggaatgaaccttcaacctccgaaaacgatacgatgacgatgagaatgcgatttctttttgcggcgctgacccttgcgctggcagcgggttcgtgcagccgcgaaccgcggaccgaacttttcaacggccgggacctcaccggatgggtgtgcgtcaccgacccggagggcgtcggcgacgcccgggatgccttctccgtgcagaacgggaatatccgcatagcgggcagtccgttcgggtacatgcgcacggaggagacctacgacgattaccggcttcacgtcgagtggcgttggatcggcgaggcgacgaacagcggcattttccagcgcgtgcaggccggcgaccggctttggcccgaggctgtcgagtgtcagttgcaggcggggcgcgcgggcgacctgctggggctgggcggcgcgaagatcgccggggcggagagcaacggaagggtcttcatcaagccgcgcagcggcggggagtgcgagcggcccgcaggcgaatggaactgtgccgagatcgtctgcgtgggcgatcatatcgcggtctgtgtcaacggcgttttgcagaacgagtgcaccggatcggtccgcagcgggtatatcgcgcttcagagcgagggcggtcccgtggagttccgcaacatctggctgacccgcttgagacgcgggatttaggttgcggctggcggcttcggcttgctctcgtcacgaacacgcgaacatgcgaacaaggggtgttcgcccttgttcgcatgttcgtatgttcgcgtgttcgtgcagaatcccggcatcgcccctggaagcggttttaaaccgccgcattatcgcttgcagcggaacgaggacaaccgcggtcttcgcccgcaagacttctttgtaccttttttccgcaaaaagtactgatcgcagtcttcgactggcgagtcgttcgccgcgaaacgcggcgagaaaagtccgcattctcgcttgcagcggaacaagaacaaccgacagcccgcgtgcccggagcgggaggctgcatagtcttgttcttgctgcgcccgctcaacgcgggccggaggttgttcccgcgaaagcgacatgcggatggttttggtacttttaacttcgctacgctcgttttcctccttctggcatggcatagcccgcaagcggtctctgctcgtgctgcgtgcgtcggttgccatcaaaagtacagagaaagccgcgacgatgtcgcgggagttttgtaccttttttccgcaaaaaggtacccaaaaactccccggcagatgccttcgcctacttcgtcccgtctaacgttggctccgggcgcccgcctaaaaggcgggtttaaggggcgatgggccgcagaaaggatcatatccgatacgacgctctcactcttaaaaccggcgtcttacgccggcgctcgcgcttttagccgggccttcgtttcacggctccggcatcgggccggaatcgttcgccgcggaacgcggcgggaggaggtgcaaaatggcccctttcgcaacctgaaaccccggttcttaaccgggcgcagaaccgggcggagagcgggccgaagctgccagtcgcaatgcaaatcccggttcttaaccgggcgaacgcgcgaacaaggggtgttcgcccatgttcgcgtgttcgcgtgttcgcaggtaaaacggatttttaagcccgggcctgccgccgccatcggaggtaacccgccacggccagcgccgagtagagggcgtaaagccccgcggtgtagggcaggtccttatagaggtaaagcccgacggtcaccagatccacgaccagccacacgagccattgctccaccagcttgcgcgacagcatccacatcgccacgaccgacagcgccgtggtccccgcgtcccagaagggtacggtgctgtccgtgaagcgggtcagcagcaggtacagcccgatgtgcgccgcggcgtagacccctgcgagcgccgggaccgtccgcaggggcgtgtggccgatgcgcagcgcggcggcccgctttgcgccctccgcatcttcagggccggtcagcccggcgtccgtttttcggcccctcctgcgccacacgagccacccgtacagccccgccagcacgtagtaagcctgcatcgagcagtcggcatacagccccgatttgtagtagagcgccccgtggatcagaggcatgacaagccccacgatccacagccggatgtcggcgcggtattcgagccagaggtagagcaatcccaacaggacgccggcgatttgcaggaggagttttatgtccattgtttcaacattcgtattgtcattccgaagaggaccgaaggtccgacgtgggaatctgctggaagcgttgtaaggtcacgactttcgcccggattgccacggcatctgcgacgcctcgcaatgcacgaagtacaattatttagttttcagagctgaaattcggtttcagcggcgttgaaatcgcgcgttttaaaatttcaccgtgacgttcgccagcacgttcagcggcgcctgcgggaagtagtaggcctcgtcgatgcgtacgggcgcggggccgctccacgtgtccatgtacgaatacccgtagccgttgctctcgtattccgcattgaacaggttgttgatcagcaggcccagccgaacgctgcgcgccgaacgggtgcggaacgtataggcgaggttgaggttggtcacgcagtaggcgtccagcgacagggcgtcgttctcgttgttggtgaaatactgcttgccgacgtgctgggtgtggaacacggcttcgaatccgcggtggtggaaattcaggaaggcgttggcgatgacgtcgggcgaataggcgatggtcatgtcgcccagctccttgccgtaggtggggctatccttcagtgcgtcgacgtagctctcgatgcggttctgcgagaaggtggcgttggcccccacggtgaaccacccggttgcgcgccacgaggccgacagctccacgccccggcggtagctgtccgggacgttggtgttgagggcgtcgctgccgtcgttcaccatgcccgtcggcacgagctggtccttgtacttcatgtagtagagattcacccccagcgagaggcgcggcgccgtgtactggtagcccagctcccagtcgtagagcttttccgacgaggggtaggtgttcgcctcggcgaacatatagcggtcggtgaagtcgctgcgcgtgggttccttctgggccacggcgaacgagaggtagaagttgttgcgctcggcgagcgtgtagctcacgccggcgcggggattgaagaagtggtactgtttgtccacgtcgatgggctgcatcccgacctcctccgaaacgtagttgtcgttgacgccccaggcctgatagctgacatagcggtactggaggtccgcaaagagcctcaaccctttggccacggaccagttggcgcgagcgaagaggttggcgtcgtgcttgtccacgtcgttgtcgtaccagcggccgccgatctggctgccttccagtccgtccacccagtcgagcacgccccagtgggggcaggagtagtagctgtacgaaccgccgaaggcgaggtcgagcttccgcaccgagtaggccgccgaggcgttcagacctccgaggtggttgcgcatgatcttctcgcggacgaggtcggcctcctttccggcagcgacgtcggccgggatattgaggtattcggagagcgtgcgtgcgtccttgtactgcttgtagaagccgtagccataggtgtagaatcccgtggcgttgagggtccacttctcgttgaaacggtgggagagcaccagctggttgttgatttgcaggtagttgtccgtctgatcgtcgtaatagtctaccgtggcgcgctgccgctcgccgtccttcatataataataggagtgcggtccgttcgaggtgtagtacatgccctcggtgtggaacctccggccgttgagacgcatctcctctttcgtcgcgcccgtgtaggtgagtcccgttttggccttgccgccgaacgaaatcagcttgagcatcgtgttgccgttgtagtagccggcctggaacatgtaggatttgaggtccgtggctccgcggtcgatgtagccttccgagccgatgtgcgtcagccgcgcgtcgagggtccagtggccgcccatcaggcccgaggagatgtgcacggcctgcttgttggtgttgtacgagccgtaggagagcgacgcgtcgccgccgaattcggtttgcagggcgtcggtcgacatgttgaccgctccgccgaaggctcccgtgccgttggtcgagatgccggcgccgcgctgcacctgaatgcttcccacggccgagacgaggtcgggggtgtcgtaccagtacatcgagtgcgagtcggggttgttcatcgccacgccgttgatcgtgacgttgagacgcgttgggtccgtgccgcgcaggcgcacggccgtgccgccgatgccgatgcccgtttcgttggtggcgatcatcgagggggtcagggccagcagcgtggggatgtcggttccgtagctgttgcgggcgatctcttcgcgccggatgtcggagtaggccacgggggtgttcggggttgcgcgcgtggcggtcacctcgacctcctgcaagcggtacattctgaccgaatcgccggcgttttggttggcgggctgcttctcttcagcccgcagctgtgcggccgagcagagcgcggcggccgcaagtgaaagaaaaatccttttcatcgttaaactttttgagttaatggactgaaaaggggtatgtgttgttgattacgcttcgtcccggtctcggcattacccgtctccggttcaatgggtataatctcagcctgacagtaaggcacccctttggaatatcgggtgcaaaggtaagtaataaaaattaaaaattaaaaattaagaattaaaaattgtcggaaaggatacccgtaaatttcgatgtatctggtgccgaaaataagttcggtcctccaatttgtcgaaacgcacagtgcgattttccgcaggtaatttttaattcttaatttttcatttttaattccttagaacgttccgaagcggaaaacgatcttctggcagtaggtttcgccggggcggagcagcggcgaggggaattcgggatggttcacggcgtcggggtagttctggcactccatcgccacgccgtcgtagtcggcatagcggccgcccgacttggtttcggggcatccgcccgcgagccagttgcccgtgtagatcatcacgctgggctgcgacgagagcaccgtcaccgaacggcccgaccggggttcgcgcagggtgccgacctcgcccagaatattgggcttccagccgtcgacgacgaagggatggtcatagcccttgaagtcgcggatgtggttgaactccgacgagatgccggggcggaaagagcggaattcccgaaaatcctgcggggttccggctgcgtccaggagcttgcccgtggggatctggcgttcgttcatttccagaatcttcgagctgttcaggcgcagttcgtggtcgagcaccgacccgctgccttcgcccgcgaggttgaaatagacatggttggtgaggttcaccacggtcgtcttgtcggtccgtgcgaggtaggtgatctccagcgcgttgtcgtcgtcgaaatcgaatacggcctcgacgcacagctcgccgggatagccctggtcgccgtcctccgagacgagcgacatcaccacgcggttggtctccacgcggctctcccagatgcggttggcgaagttcttcgttccgccgtgcaggtggttcacgccgttgttgacctccagccggtactccttgccctcgacggtcatctgcccgaaggcgatgcggttggcgcagcgtcccacgctctttcccgaggcggctccgtcgaagaagtagccttcggggtgtttgtatcccagcaccacgtcggccatgcggccctcgcggtcgggcatcttcaccgagacgatcgccgcgccgtagttcgtgagctgcacttcggctcccgagtcgttgcgcagcgtgtagcgaatgattgcctcgccctccggggtcatgccccagacgtgttgttcgatttgtaccatagtttaatataagttcgacggggttaggttgtttttagatcggagcgattttgtctatgaacccccatcgaacttatattacggcgtttttaacgccggggctcatgttgaaaatccctctgaatcgcccttttcaaagggcgactttactctattgcgggttttagattggtcagcagattgtcgatacgcttcagacactcctctttaccgatgaacgacgttacgtcgtacatgcccgggccttttccggcgcccacgagggccagccgcagggtgttcatcacctggcccatgccgtagcccttctcctcgatccaggcgtggacgatgcgttcggtgttctccagcgagaagtcgtcgattcccgccagcacgtcgcgcaactcccgcagaatggcgggattctgccccttccagtacttgcgcacctgcttttcctcatactcccggggagcctcgaagaagaacgacgtgaggtcccacagatcggtcgtgaacgtcgcgcgctccttcataatgcccgcggctttgccggccacggcgtccgaaacctcgatgccgtggctgcgcaggacgggctggtagagggccgccagttcggcgtcggtcttgtggtgcatgtactgggcgttgaaccaccgggccttgtcgggctggaatcgggcgcccgatttcgagacgcggtcgagcgagaagctgtcgatcagctcctgcatcgagaagatctcctgctccgtgccggggttccagcccagcagcgccagcatgttgatgaacgcctcggggaaatagccgtcctcgcggtagccgtgggcggtctcacccgtcggagaggtccagaagagcggaaataccgggaatcccatcttgtcgccgtcgcgcttcgagagcttgccgccgcccgtgggtttgagcagcaggggcaggtgggcgaaccggggctgcacgtccgtccacccgaaggctttgtacaggaggtagtgcagcggcagcgacggcagccactcttcgccgcggatgacgtgcgacacctccatcagccggtcgtcgacgatattcgccaggtggtaggtgggcagcgcgtcggccgatttgtagagcaccttgtcgtccagcgtcgaggtgttgacctccacgtgtccgcggatcaggtcgtccatcgcgaccgtttcgttttcgggcatccggaagcggatcacccactggtcgccgcggtcgaggcgcgccttcacctcctcggcgggcagcgccagcgacgtggccagcttttcgcgcaccgcataattataggcgaacgcctcgccgcgcgcctcggcctccctgcgcagggcgtccaattcctcggccgtgtcgaaggcgtagtaggcccagcccgcctcgacgagttgcagggcgtatttgaggtagatttcgcgccgctcgctctggcggtagggggcgtgaggccctccgacgcccacgccttcgtcgatctcgatgccgcaccatttgagtgattccagaatgtaatcctccgctccggggacgaaccgctgcgaatcggtgtcctcgatgcgcaggatcatcgttcccttgtgccggcgggcgaacaggtagttgtacagtgccgtacggacgccgccgatgtgcagcggcccggtggggctgggcgcgaagcgcacccgaactggtctttccatagctgtattctttaatttttttacgatcccgggttgcggcgtcagacgttgaacaggaagtgcatgatgtcgccgtcctcgacgacatactccttgccttcgatcgacagtttgcccgcatcgcggcacgccttctccgaacccaaggcggtgtagtcgtcgtacttgatgacctcggcgcggatgaaccccttttcgaaatcggtgtggatgatgccggccgtctgcggggctttcatgccgcgcaggtaggtccaggcgcgggtctcgtcggccccggtggtgaaaaacgtttcgaggttgagcaatttgtaggccgatttgatcaggcgcgccacgcccgactcctccagtcccaggtcttcgaggaacatctgccgctcgtcgaagtcttccagttcggcgatgtcggcctccgtggcggcggcgatgacgagcatttcggcccgctcgccggcgatggcctcccggacggcctcggtgtaggcgttgcccgtcgcggcgctcttttcgtcgacgttgcagacgtacaacacgggcttgtcggtcagcaggttgaggtcggcgaccagtttgcggtcctccttgtcgagttccacggtgcgggccgaaagcccctgttccagcaccgccttgtactgcaagagcaactccacggcgcgcttggcctgcttgtcgccgcccgaggtggcctgcttctgggtcttggagagccggttctcgacggtttcgagatccttcagctgcaattcggtgtcgatgatgcccttgtcgcgcacggggtctatcgagccgtcgacgtgggtgatgttgccgttgtcgaagcaccgcaggacgtggatgatcgcattcgtgttgcggatgttgcccagaaatttgttgcccagaccttcgcccttcgaggcgcccttcacgaggcccgcgatgtcgacgatttcgatcgtcgtcgggaccacgcgcttggggttgtcgatctccgcgaggcggatcagccgccggtcggggaccgtgatcacgcccacattgggctcgatggtgcagaaaggaaagtttgccgcctgtgcctttgcattggacagacagttgaaaagggtcgatttacccacgttcggcaagccgacgatgccgcattgtaacgccatttattcgtttcgtttatgttgctgtcagacaaattgcgcttatcgtgaaacaagcccacaaagatacgaatttcttttcaataatcggagacgctcgcgggtaaaagcggaaagggggatggtttccggctctgggcgcggaaaaaagcgcttctgtccgttccgtttatcccttggcaaataaaacctcttcgccagttggcgaagaggttttatttgccggcagcaaggctggctattcggccagcgaccattcgatcacgaccgggaagtggtccgaggggtatttccggttgtaactgttgttgacgatgcgccacgaaacgaccttcgtgtccttcggcgtgacgaagacgtggtcgatgcgcgacgcagcggcgggaggcgtcgagatgtatttgtagccgttgtaggtgggccagtctccgttggtcttggacggacagcggacgtagctgtcggcaaggatgcctgatccggcgatcgttttgtaggcttcggtgttttggttcgaattgaagtcacccgtgcaaaaggccggtttgccgcctgcgatctcccggaccttggccaccagcagtttggcgctctcggcgcgggccgtggtccctatgtggtcgaagtgcgaattgaaatggtagaattcccgtccgttcgcgcggatgcggaaatgcacccagttgcacatgcggggcgaataggagtcccagcctttggacccgggggcggaaggcgtttcggagtaccagaacgatcccatatccaatacttcgaatttgtccttgcggtagaaaacggggttgtagtggcgtcgttgggccgttttgtcaccgatgacgttttctccgacccaggtgtatccgtcgaggaacggctcgatgtccttgatctgggtcagataaggctcctgcgctccgaagatgtcgaacttctcgctctggagtagttggcgaagcaaatcccggcgggtcgtccatttgttgtcttgatcggaagagttgtcgtactggatgttgtaggtggcgacgcgaatcggatcgagccactcttttccaggtgcaggggcgggtgcgggatcgtcgtttcccgaactgcacagcgagaagagcggcaggcagagcaggaacagactgaaatacggttttcgtatcatttttccgaaagagattggtttcgaatttaagacgaactgtttccggttttgtccccgggggggggcgaaaatttgctatttcgcattttttattcgatttttaccgcttgcagggggacaaaccggacggttttccgttatatcgaatgaccgaccaaaccaatgaaccgaatgtttcggcaacgcaagtacgacacccgacgaatcgaccggcagtatgccgaagagaccgacgtatatgttatgttgtataacagttacgccgatgcgctctatgcctacggcatggggttcggtttcgacaacgaaacggtcaaggatgtcatccacgacatattcctcgacattatgacccgccaggtcgacctgggccgcatcgtcaacatcaaggcctaccttttccggatcgttcacaaccgcctggtcgatctgcaccgttcgcgggtggacaaatgcgacctttcggaccgggagccgggattgcgggtgtcgctgacctcgctcgacgcgatgatcgaatcggagcacgtgctgcgcatccgccaaacgatcgagtcgctgctcaaccagctctcgcccaagcagcgcgaggcgctgctgctgcgcttcgtctacgagatggagtatgacgacatcgccgtcatactcgacgccacgccccacgccgtccgcaagttcgtgtcgaaggggctgggcaaacttcggaagggcagggagtgcggcaaaacgatgaaaatagccacttgacacggcggacgctgttttttgcggttcgagggggacaaaacggcggattcgccgtcataggggagagcgcggcgccgcagccgcagcatgcagtttgaagattacgttggaatcaatgataaaaccggacgatattaagaagcacacggcggagttcttcacctccgacccggacttcgttttgtggtgtctcgatcccgagcgggcgcaggacggctattggtgcggttacaccgaacgccatccgcaggacctggtcgaattcgagcgcgccgtgagcctggtgcgccgtgtgggcaagacccatcccgcgctgccgtccgtggagaaacagttgctgctcgaccgcatcctgaccgaccattacgcccggcgccgttttgcagcccctccccgccgccgcaaccggacggcgctcttcgccgccgcttccctgctggtcgccggcgtcgtggcggccctgttctggagtgcggatttcacgggttccgggctgccttcggccgaggcctatgaaaacatcacgctcgtgacccgcgaaggcagccgcgaggtgtacgacgacatcgcccgtatcagccttacgcccaagggcgaaatcctgatcgacggcaaggagaacgaaggggcggagaccgatcgcaggacgccccggcaggaggtgcgcgtgcatacgagtgagttggtggtccccaagggcaagcgcgcacatctgcaactctccgacgggacgcgggtgtggatcaattcggcgtcggtgctccgtttcccgtcggcgttcggggacacgcgcgacgtcttcgtcgagggcgaagcctatttcgaggtggcgaaggatgcgaaccgtcccttcatcgtgcacaccgaccattttgcgacccgcgtgctgggcacgtcgttcgacgtgacgaccgcgccccgggccgacggttcgtcggccgtggtgctggtcgaaggctccgtggccatcgacgtggccaacggcgaatcggtgacgctgaatccttcggaacgcttctcgatgaaggacggcagctattcggtctacgaggtcgatccctataaatacatcagttggaaggacggactgttgttcttcacctcgaacacgctgttcgaagtcctgcaaaaggtggctgcgttctacaagatcgaaataacctgctccggggagatcgggagccggaagtgtaccggcaagctgatcctgttcgacgacctggacggcacgctcgacgtgctctccgacattttccggatcgcctacgtccgggggcccgacggctcggtggcggtgaggcctgcccccgacgattgcgccgacgccgtatatcgctgacaaccaattccagtcttaaatactaaccttaatactgttacttatgaagaaacttttctttgtgaggagtggctcgacatgccgtatgctgcggattcttgcggcggtgatgctgttgcttccggtgaatctccagcccgtccgggcctcccggcaggacgccggggccaaatcgtcgctgaccgtgaagatgaaggacgcaacgctgtcgagcgtctttgccgaggtcgagcggaccagccgctacgccttcatttacaccgacgacgtgcggccgctgctcgaccgccgggtttcggtttcggtcaggtctgcgaccatcgacgaactgctgtccgcggtcctcaagggaacggagctgaccggacgggtgcgcgaaagccaggtgatcatctcgaaagcgcccgctcggaaaaacgccgccgtcaccccccccctcccggctgcgaattccggtagggaaatcgtcttgcaggggacggtgatctcttcggccgacaacaagcccatcgtcggtgtttcggtctatgtcgaggggacgaccgtcggcgccacctcggacatcaacggcaactacaccctcaaggtgccggcgggaacgaaacacgtcaccttcgcttttctgggctacgacaccaagaagatcgccgtcgccgatgtcgaactgttcaagctcgtgacgctgatcgaggcgtcgaacgtcatggacgacgtggtggtcgtggccttcggcacgcagaagaaggagagtttggtgggagccgtgcaggtcgtgcgtcccagtacgctcaaggtgacgtcgagcaacctctcgacctcgttcgcgggcaagatcgccggcgtcatctcgacccagtcgtcgggcgaacccggcgccgacggtgcgaatttctggattcgcggcatctcgaccttcggggctaacaaatcgccgctgctgattctcgacggcgtggagatcgtctcggagatgctcaacaacattccgcccgaggcgatcgagtcgttttcgatcctgcgcgacgccacggccacggcgctctacggttcgcgcggcgccaacggcgtaatgatcattaccaccaaaaacggccgccagtcggagaagatggcgatcaacgttcgtctcgagtcgggcatttcgatgccgacgcgcgtgcaggacatcgccgacggcgtgacttacatggagaactacaacgaggcgctgcgcacccgcaccccggcgggcgaaacttatgtgcagcacttttcggacgagaagatcacgggcacgcgcaaccggctcaatccctacgtctatcccgacaatgactggtattcgatgcttttcaaggattttacggtcaacgagaacatgaatctcaatgtgcggggcggcggcaaggtggtcgactatttcctcaatgcttcgatcttcaacgaaaacggtatcctgaagaagcccgcggagtcgaaattcaacaccaacatcaattcgcagaaataccttttccaggccaacgtcggcgcgcagctcacccgaacgacccgcgtgagtctgaagatgaacacgcaactgcttttctggcaccgtcccgtcgaagaggtgaaagacctgttctactatacgatgcgcgccaatccggtcgcttttccggccatctatcccaaaggctccgtggaggatctcgacgacccgattttcggaaatgccccttcgtgggacggtggttctacggacatcaatccttatgccctgttgagccgcggatacggacagcgccatacgcagtacatcaccacgaccttctcggtggaccaggacctcgatttcgtcaccaagggactgaaagtccggggcatggtctcgttctacaacaagacctatgcggcgacttaccgttctttttctccctattattacgaaatgaccgactataccgacaacggcgacgggactttcgactacaacctgcaaagcatcggcacgcccggatcgtcctatctgggaacctccacggggcggaacggttaccgtgagatctcgttgcaggggcagatcgaatattcgcgcacgttcggcaaacacgacgtcaacgccctgttcgtctaccaccagaaggagaaggtcgacaatcagcccgccaatgatgagtacaaggtgctcccttaccgcgagcagggtctcgccggacgttttacctatgggtacgacagtcgctacctgatggagttcaacttcggctacaacggctcggagaacttcatatcgggtcgtcgtttcgggttttttccctcgatcgccggagcgtgggtcgtgtcgggcgaaccgttctgggacggtatccgcagcaaggtgaacctgctgaaaatccgtgcttcgtacggcctttcgggcaacgactatctggccgacagcagcaacaacatcgtccgtttcccctatctcacgacggtcaacatgaacaaggcgctctacgtgtggttttcgcccaacttcgtcaagcagaccggacacgagatcaagaccgtgggcaatcccctggccacgtgggaggagagcaccaaacttaacgtaggacttgaactgggactgttcgacgccctgacgctgaacgtcgacgtttacaaggaaaatcgtaccggcatcttcatgcagcggcgttcgctgccctcgacgatgggcctttcgggcgtcacgccctacggcaatctgggtgaggtggagaaccgcggcgtcgatgtttcgctcgaatacaacaaggcgttcaacaaggacctgctggtctccgtgcgcggaacgttcacctatgcgcacaacgaggtgaaggcccgcgacgaggcgaaatacctgcccaacaaatacaactccgtgctgggcaaacccgtcaattcggtttacggactggtcgccgacggccttttcgcctcgcaggaggagatcgacaactcgccccggcagaccttcatgcccgattatctgccgggcgacatcaaataccgcgacatgaacggcgacggcgtgatcgacgccaacgaccgcacgtcgctgggttatcccaccgtgcccgagatcttgtacggcttcggcgcctcggtcaactacaaacgctgggacttctcgttcttcttccagggcacggcgcgcgtctcgctgcgcatgtacgacatgcacccgttccgcgacaatcagtattcgggcttcaacatgacgcagtacgttgccgacgaccactggtcggaagccgatcccaatcccaatgccgcctatccgcgcctggattaccgctacaacgccaacaacacgcagacctcgtcgttctggatcaagaacggcagctacctgcgcctgaagagcgtcgaactgggtttcacgtacaaaagcctgcgcgcctatctggccggcacgaatctgttcatcatttcgcccttcaaatactgggaccccgaaatgggaagcggcaacggcttgaaatacccgttgcagcgcgtggtgaaactcggccttcagtataacttctaaaattcgagcgacatgaaaaaaatcatatccattttgctgtttgcgtgcgccggagcgcttgccgcgtgcgatttcctcgacgtggttcccgaggggcaggcgacgcaggaggacatcttcaaaacctccaaggaggcccgcaagtacctcaatacgctctacacctacgcccccaacatcgcggcctaccgctacatgcccgacttctgcgccggcgacgacattatcaccgccaccaacggccagacccgttattttccctacaagagcatgctctacaacgaggagaacgccagccagacctactacggtctgtgggacgcgacgacctcttccccgtccgggcgcacgaactacgacatgtacaagggcatccgctactgttacattatgatcgacaatatcgacgcagtcccgggcatctcgccgtccgtggccgacgagttcaagggcgaagcctattttctgatcgcctattaccactgggtgctgctgactcactacggcccggtcatcctcgtcagggggcagctggacatggggcttcccgaggagcaggtctatgtggcccgcagtccgttcgacgaatgcgtgacgttcatcgccgagacctacgaccgcgcggccgatttgctgcacgggtatccgacgcgtcccgatgccgacctggggcgcgccacctcggtggcggccaaggcgatgaaggcccggctgctgctctatgccgccagtccgctctgcaacggcaacacggagttctacgcgcgtttccgcaacaacgacggcacgccgctgatgagccagacctacaatcccgaaaagtggaagtgggcgctcgacgcctgccaggaagcgatcacgctggccgaggacaacgggcacaggctctacgaaagcccgaacgcgactgcggctgcaaccgctgccgagcgcggcgagatcaactaccacgactgcttcgtcgaaccgctctggaacacggccgagtacctttgggcgatgggcgaccagaccggcatcgagcacttgcagcgttacggaggcgcgcgcctgaagctgccgtacagtaccgacggcttctgcatcaacatcgttccgacgttcgagtgcgtggagatgtactacacgcacaacggtctgccgtgggaccgagaccccgagaccatgcatatcgacccctatgcctataatgccgaaaaggagactgccaacctccatgtctacaaggagccgcgcttctatgcgtcggtgggctacgaccgcggcaagtacgccatcaacggcgaggagttcattctcaaatgccgcgccggcgagatgcagggcagcgtgctcgacgcctcgaaggagtaccagagctgtacgggctacattctcaagaagtggattcaccgccagtcggccttcaactacgacaccaagtcgtggacctaccgcaagtacgcctatccttacatccgccttgcggaactctatttgagctatgccgaggccgatttcgaatacaacgggtcgttgagcgacgcgagcctcaattacctgaatctggtccgccgccgctcggggctgcccgatttcaaggattcgtgggccttggccgggggcattcccaccggcgacgaactgcgcaaggtgctgcaccgggagcgttcgatcgaactgctgatggagggcatgcgctaccacgacctgcgccgttggaaagaggcgggcgaagcgatgtcccggcgtcccaaggcgtggaacctcgacggcaggacggcggccgatttctaccgggtctccacgatgaaggagagcggcgtccgcacgttcgaatcccccaagacctactggatggccattccgttgagcgaaatcaatatcaactacaacctcgtgcagaatcccggttactaaccttaataatccgattgcgatgaagaatcttgcgatatgcctcctgcttctgctgggagccgtagggtgcggcgacgattacgtcgtctacgagacggtggacactatggtctgcatcccgaagaacgatttccaggtcctcgaatacgatgccgcttcgggccaagcgtgcgtttacgatctctatctttacaagggcggttacaatgacgacggaatcaccgtgaaactggtggtcgacccctccgtgctcgatgtctataacgtggaaagcggactcgaactgaaggtgatgcccgacaggtatttcgccttcgaccccgaagtgcgcttgtcgggggacagggtcatggaccgcgccgaaatccgcttcgatgccgcttcgatgcttgccgacggcattgattcctcctatgtgctgccgctttccgtcagggccgatgatcagggcaaggtgcgtcccgaaaagaacagcgtaatcatccgggtcgtgatgaaataaccgtgatgcggaggaggtccggcctcctccgcatcctcaatgcaaaaaaatatgtcaaaattctacatgcggcttctgtcggtgtgcctcgccgcccttgtcctggcggcctgctcctcctcggagggcggcggtgacgacggcccgaccgccggacagatccccgataaggccggaatgacggtgaagggaatcgtgaaggacagcgccggcaatggcattgccggggtggtggtgagcgacggcctggaggtgacggcgaccgacgaacgggggatttactatctggcctccgacctcgcgcggcgcaatttcgtctttgtctccgtgcctgccgactgcgagattcccgccacgcagggctgtccgcggttctaccgcaaaatcgaccgcaaacaggccgtcaaccgggccgattttacgctgacacgacgcaagactccgtccgaccgccattcgctgatcgttatggccgacattcagctggctgccgataacacgtcggtggattcctatctcggtcatgtcgttcccgatgtgctgaaaaccgtgcaggggcttccgacggaggtttacggagtcagcctgggcgacctggtctggaacgatatgtcgcttttcccgaagtaccgtcaggggctggagacgcttggcttcacgaccttcagcctgccgggcaaccacgatcacgatccggccgagttgaccgattcgctcgccttgcagagctacgaacgctatttcggtccggcgaactactcggtgaacatcgggaaaatccattatctgttcctcgacaacatccttttcgaccatgcgccgaccgccgaagaggagtatacgatcggtcttacggacgaaatttgccgttggatcgaagccgatttgcgctacgttccggcgggcagcacgctcgtcgtctcgtcccattgcccgattctctatcacacgaagaacaccgcagcgcgcaaccaccgcaatttccagcgtttcctcgatgcgataagcccctataaggtccatgccttcggggggcacaagcactaccatgacatttaccgttacgacgacggacgcaaggtcatgcactgcatcgcccgcacgccgggcgacctgttcatcaacggcgacgtcaactgcgacggcacgccgcgcggctatgccgtggtcgaggtcgatggcgaacggctctcgtggtattacaagccggcgggcgggaagcgcgatatgcagatgcgcctctatgcacccggacgcaccaattcggcctgtgtctatgccaatgtctggggttatgacacggcctggagcgccgtggagtggattcccgcttcgggcgggcaggcggtggcgatggagcggacgcagcgcaccgatccctattacgaggaggtgctggcgacgggtgtgcgcggagggacgccgaccaatacgtggcatatgttccgggtcgatccgggcagcgagcggggcggcatggtgcgggtcaccgacagtttcgggcatacctacgaatcgtccgtgtcctggtaaatacgacattcgaacaaaaccttaaatacaacttcaacgatgaagagactttttctttttctgaccgtcgcggcagccgtttgctgtgcggcgtgcagcgacgatcccgaggtcgccgaatccaacctttcactgctcgaggataacgtgacgttcgatatgttcggagggcgcagcgtccttgaaatcacggccgattcgccgtggacggtctcctgcgacgacgattggtgccgcaccaacgtcgccgaaggttcgcacacgaagaagatcgttctgacggtcgaccagagtttcctgcccgaggagcgcacgaccgcggtgcgtttttacgccgcgggcgaagagaagcacaccgtgaccgtgacgcaggagaagttcgagccgatcctcgtgctggcggagaacggcgccgatataaccgtctacggcgccgggagcgaaccggccctgaacctgcgtgcatccgtggcatggaaaatcgagggcgcgaccgactggtgcgccgtgtcgcagtccgaagggacgaaaagttcggtcgtgaaactgttgctgaccgacgacggcgagggcgtgcgtccgcgcagcgcgacgctgaccgtctcctccgagatggagggcgtcgaaccgcagcaggtgaccgtcgtgcagcggtcgaccggagcgaatacggtcgtggtccgggcgggtgaaacccgtgcgtttccggcgcggcgcaccgacggcgcgtatgtgaagggcgttgcggcggactgggtctggaccaccgacgcagagttgctttcggggcttgactacgacgcttcccggaatgaaatcacctgcactgcggccaagtcgaagcagggcagcgggctggtcgcgctgttcgacgccggaggcgcggttgtctggtcgtggctggtctgggtcgtggacaagatgccttcggacgtgaccgtcggcggtatcgcctggcaggaccgcaatgtcggggccgaataccattcggccgacccgaaggcctgtgtgcaggatttccgctcctacggactgttctatcagtggggccgcaaggagccgttcatcggcgcgaagatcctctcgaagaacaaatattacgaggggcatgcggagtatcccgatgctttcggcgcgatgacgcgcgaggtggttttcaacgcctcccgcaccgccggctggcaggtcagcggcgaggagatgacagccgcaacggcaaacggcaatccgacgacgttctatacccggtcgtccgcagcgatgtccgaaggctggaccgagggcggcaaggggctgaacgatccctgcccggtgggataccgggtgccgacggcggccgaatggcagtcgctgcttgcctacgtggacggcaacgccgccaagaaccaggactcgggcgacacgtacagccgctggtatgcgctcaattcgggcggaaccctcatcggcccgtcgacgatgttccgcaagggcgataacggccgcatccactatccggggcgttcggcagcctattgttcgtcgacgctcgccggcggcaagccgctcccgatgtacgactggaaggcgggcgacgccacgggcgaggggacctattacgaacggaagatgaccacagcctacggcatgcgctgcgtgaaggagtgacgccgctgcgatcgcgggggcttcgggcgggagtgagtttattccgttccgaagccctttttttgcggtattttcattaccttcgcatgtcttttcaaacttttaccgatgaaaaatagcatctttaccgtattggcggccctcgtgctgtatcccgccggggcgcagcccgtcaccccgcaggaccggcggcgcgccgcggaactggtcgaacgcatgacgctcgacgaaaagatcggccagctggtccagcagcgcggaggcggcgccgtcacgggacccgacaagacggaactttccgtcgaacggctggtccgcgaagggcgctgcggcagcgtattcaacatcaagtccttcgaggagaccgagcggttgcagcggatcgccgtcgaggagagccggctgggcatcccgctgttgatcggcgccgatgtgatccacggtttccggacgatcttcccgatcaacctcgccgtcgccgcctcgtgggaccctgccgccgcggagtcgctggcccgcgtttcggctcgcgaagcctcggccatgggcatccattggaccttttcgccgatgtgcgacgtttcgcgcgacccccggtggggccgtgtctccgagggcgcgggcgaagacccctatctgggcgcgcgtgtcgccgaagcgatggtgcggggctatcagggcgacttgtccgacccctcgtcggtccttgcctgcgtgaagcatttcgccgcctacggcgctccgcaggccgggcgcgaataccatgcggtcgatatgtccgagcgggttttccgcgacagctacctgccgccttaccgggcggcgctcgatgccggggccgcgacggtgatgacctcgttcaatgacctcgacggcgttccggccacggccaaccgctggctgatgcgcgacctgctgcgcgacgaactgggcttcggcggattcgtggtgaccgactacggcacgatcggcgaactgaaagctcacggcgtggcgggcgacgatgcgcaggctgccgaactggccctgcgcgccggggtcaacatggacatgatgagcgccgcctacctgtttcatgccgccgaactggtgcgggaggggcgtatcccggagtcgctgatcgacagcctttgctgcgaggtgctggccgtgaagttccgcctggggctgttcgacgatcctttccgctaccaggcgaaggagcgcgagaagtgctattacgccctggaacatctcgatgccgcgcgccgcgtggcccgcagttcgatggtgctgctggagaaccgcggcggcgtgctgcccctgaaaaaggggagccggatcgcgctggtgggacctttcgccgattcccggtgggacctgatcggctcgtgggttcatttcgccgaggccggccggacctcgacctttctcgacggactgcgggcgcgtttcggagccgaccgtgtgacctatgcccgcggatgcgacccgcacaaggccctcgaaggcggtatttcggaggcggtggccgcagccgcgaagtcggacgtggtgctggtcgcgctcggattgaaggcgggggagagcggcgaggcggcaagccttgcgtcgcttgcgctgcccgacgcgcagcgtgacctgctggagagcttgaagcaaaccgggaaaccgattgtcgtcctgctggttacgggccgtcctatggagctggcccgtgaagcggaacttgccgacgccctgctgctgacctggtatccgggcacgatggcgggcgaggcgctggccgatgtcgtgtcgggcgattacaacccttcggggcgtttgccgatgacctttccccgcacggtggggcagattccgatccattacgacatgaagagcacgggacgtccggccgacgagtcgggcaagcccaacaaatacacttcgcgctatctcgacgtacccaattcgccgcagtattgtttcggctacgggttgagctacacgacgttcggttattcggacctgcgggtgctgacgcccgaaaccgccgtcggcggcgaggttcgcgtgtcggtccgcgtgaccaacacgggcggccgcgacggcgaggaggtcgtgcagctctacgtgcgcgatctgctgtccggtgtgacgcgtccggttcgtgaactgaaaggtttccggaaggtcatgcttcgcgccggggagagccgcgaggtgaccttcacactgacgcccgacgacctttcgttctggcgtctcgacaaaaagtggggccaggagccgggcgactaccatgtctgggtagggcacgactccgactgcacgctcggcggcagtttccggatcaccgaatgattcgtctctccggcacggcggccgacgccgcgggtgcgggacagctgcaagggagcagcggcttcggccgccgctcccttttccgtgcccggcgggacggtccggatgtcccggaaaaacccgttcggagatgtttcggacaaaaggttccggggaatggctgggctttcgcaaattttttctacctttggaggtcaaaacagtacgcaatgatggatttgaagacgatacgtgccgaactgcgcaagctgaccgcgattgtcgacggctgggagccttccggggagattccggccctcgaacgcgacctggcgctggaaaaactgcggacgctctacgatgcggtgcgctttacggaggtggaatcccttccggaattcccggttgcggagacggagcctgcggcggctccggtgcccatcgacctcggggcggtgctttcgctcgacccgacggacgaagccgtgttcgaacccggtcccgatgccgtttcaggacccgcgttcgatgcggaggcggaacccgcagagccgttttccgaacccgatacgacggtcgcggccgattctgccggggcgtttgccggggggaatcccgatacggagacgcccggaatggcggagcctgcggtgtcggattccgagccggaacttgagggggaatccggatttgagcctgatcccgaagcggcgtccgaagccgcattcgtcgccggagaatccgaaccggccgccgaatccgggccggtcgctgcgcctgaatccgaggctgcggctgaaccgtctgcgaagccggtcgctgcgcccggacctgccgctgcggctgaatcggccgtcgttccggaacccgctcctgcgccagctccggaacccgctcctgcggagaaaccccaatacatcgcgcccacgctgttcgggctggaggaggagaccgtccgccaccgtcacaaacagcgcgtcatcatgtcgctctacgatacgcccgcgcccgccgaaaagcccgcaaggcccgaaacggcggaaagaccggcggagcgtcccgaacccgctgcccgccccgaacccgctgtgacgctcgaacccgctgcccgtcccgaacccgctgcgacgcccggaccgactgtccgtcccgggtttgccgcgactcccgaaccggcggctgcgcctgcgtccgcaggtcccgggccgcagtccggaacgtccgtgccgcagtccgcggcggaacccgtcaccgtttcggaagcgcctgccgccgccgagccggaggaggccgaatccggagcgaaggaggttgcggtccctgtcggggccgtgctgggcgaggtgatcaaccacgacgtgcagacgctggccgatacgatcgctccgcggcgcgacatggcttcggaactgcgccgcggcgaaccggtcgccgaccttcgcaacgccatcggcatcaacgacaagttcctgctgatccgcgatctgttcggcggcgacggcgaagcctatgaagaggcgatcgcgacgctcaacgccttcgacgatttcgacgagtgcatgatccacattgccgagaactacgcctggaatcccaattcggacggcgcgaagtttatgatggaactgctcgaacgcaaattcgcctgacacgatggccaaactctatatcgtacctacgccgatcgggaatctggacgacatcacgctgcgcgcggtgaacgtcctgcgcgaggtggatttcatcctcgccgaggacacgcgcacgacgtcgttcctgctgaagcacctcggcatcgagcagaaactccgttcgcaccacaagttcaacgagcacgccacggtcgaaatggtcgccggggcgatcgccgcgggacgcaatgccgccctggtgtcggacgccgggacgcccggcatttcggaccccgggttcctgttggtgcgcacgtgcgtcgaggcggggatcgaggtcgagacgctgcccggcgccacggcgctgattccggcgctggtgcagagcgggtttccgtgcgaccgtttctgcttcgagggcttcctgccccagaagaaggggcggatgaagcagttgcaggcgcttgccggcgaggagcgcacgatgattttctacgaatcaccctaccgcgtggtccggtgtctcgagcagttcgccgaggttttcggtgaagaccgccgggtttcggtgtcgcgcgagatcaccaagaagttcgagcagaccgtgcgcggaaccgtcgccgaggtgctcgggcatttccgcacgaccgaacccaagggcgagttcgtgatcgtcgtggccggaaaacccaaagtccgccgcgtccgggaggacggggaggagtaactcaaatcgaaacgcaattgatggaagagaaccgtacagacgatacacaaaaggtaaaacgttcgttttcggcgtggctcggggagttgcgcgaatttatgaagggccgtttcagcctcgacgaggacaaggcgcagcgcgacgaggtcgtggcctccgtctcgaagggcgtggagttccgcggcgtcaacctctgggtgctgatcttcgccacgatgatcgcctcgctgggcctgaacgtcaattcggccgcggtgatcatcggcgcgatgctcatttcgccgatcatgggcccgatcatgggtgtcggcctcgcgctgggcatcaacgatttcgaactgctcaagaagtcgctgcgcaacctggcgctgatgttcatcgtcgccatcatcacctcgacggtctatttcttcatctcgccgctctcgtcgaacagcagcgagctgctggcgcgcaccgtgcctacgacctacgacgtgctgatcgccctgttcggcggcctggcgggcatcgtggcgcagacgcggcaggaccgcacgtcgaccgtcattcccggcgtggccatcgccacggccctcatcccgcccctctgtacggcgggcttcggactggccacggggcagttccgctttttcatcggcgccttctacctcttcttcatcaattcggtgttcatcgcgctggcgacctatgccatggtgcgttttctgcaatacgagaagaaggtcttcatcgacaaggtccgcgagcgcacggtcaagcggctgatgatggtcatcacgctggtgaccttcatcccgagcgtcgtcatcgggttccacatggtccgcgtctcgttgttcgaggccgtggccgacaaatacgtgtcgcaggtcttcaactttccgcatacccgcgtgatcgagtgcaacaaacactacgcgcagggcaagaacccctcgcagatcgagctgctgctcgtgggcgagccgctgggcgaggaggtgatcgagaatgcccgtacgcagatgcgcaatttcgggctggaggaggccgaactggtcgtccggcaggccaatacggaggacaaggtcgacgtggtttcgcttcagaagagctatcaggagctgctggaggagaagaaccgccggatcggcgagatgtcttcgcagctgaaacgctaccgggtgaccaacgtcgaggtgaacgacatctcgcgcgaagtgggggccatgatggacaacatcggggccatttcgctgaccaagggcatcaccttcgacgtcgagggcacgcccggcgatacgacgctcgtgtgcgtggtgacgccccgggattccgcgcttccggtcgaccgtgaaacgctgatccgctggttgagaatccgcaccaaggtcgagaacgtcaaacttttcgtggaaccctaatccgggcggcaggcatgaaacgaaccgatctgaccattttgcagcgcttctggctggagaccctttggctgggcgcacgcgtgttcgccgtgatgccttactggttcaagtactacgtcgtcgaaaacctgcttttcgtcctgctctactactgcctgcgctaccgcatgaaggtcgtcaagaccaacctgcggaactcgttccccgagaagagcgaacgcgaactggccgtcatccggcggcggttctaccgcacgctgtccgaaatcttcgtcgacacgatcaacatggcctacatgaacgaggagaaggggcggacggtgcttacggtcaaagacgtggagaaacacgtggaagcggtgcacggccgcgactggatcgccatgacggcccatttcggctgctgggagtactgctcctactgggggctttacgagcggtcgcagatgctggtcgccgtctaccatccgctgcgcagcaaggtgatggaggaactctaccggcggctgcgcaattacgaaaattcgatgaccgtctcgatgaaggagagcctgcgtttctacctgcgcaaccggaccggaggcatcgccggcaagaacctcgtgatggggcttatcgccgaccagaatcccccgcggcggcccgacagccgttggttccgcttcctcaatcaggatacgatcttcttcgacggtggcgagaaactggccctgcgctgcaacctcccggtctacttcgtgaagatgagccgcctgcggcggggacgctacgaaatgtccttcgaactgatttatgacggcaaagaggaggtcgccgaatacgaaatcacgcagcgttacgttcgtaagttggagcggatgatctgcgagtgtcccgaactgtggatgtggtcgcatcgccgctggaagcacaaacgaactcatgccggtcgctaaaattatcatactcaactggaacggtgcggaccacctgcgtcgtttcctgccgtcggtcgtggccgcggctcccgccggcgtcgaggtcatcgtcgccgacaacggttcgacggacgactctcttgcggcgctcgccgccgggtttccgtcggtcacggtcctgcgcatggaccgcaactacggctttgccggaggctacaaccgcgcattggagtatatcgaggccgattattacctgctgctgaactccgatgtcgagacccccgaggggtggcttgcgccgattctcgactgtctggaccggaatcccgacgtggcggtcgccgcgccgaagctgatctcctgcgccgaccgcacggagttcgagtatgcgggggctgcgggcggtttcatcgactacctgggctatcccttctgccgggggcgcatcctgcgctgcgtggagaaggaccggggccagtacgacgacgagcgcgacgtgttctgggtgagcggcgcggctttctgctgccgggccgacgtgttccgtgcgctgggcggcttcgacggcgatttcttcgcccacatggaggagatcgacctctgctggcggatgcagctggcgggttaccgggtgcggatcgtgccccggagcagggtctaccacctgggcggcggcacgctccagaccgattctccggccaaggtcttctacaatcaccggaacaatctcgccatgctttacaagtgcgcctcgcccgcacagcggctttgcgtggccgttgcgcgcccggcgctcgacctgctcgccgcgctgtcctacctcatgcagggccgccgggacaacttccgcgccgtgttccgcgcctggggcgacttcatccgctggcacggggcgctggcccgcaaacggcgtgagatccgcgcgaaccgcaagggctccgccgcggaaaacatctaccgcggctcggtggtgctgcgctatcttttcggccggcggaccttcggcggcatgatgcgctgacgcggagccgatgtcgtcgttttcgcaacgggacttgtgcgatcttcgttttttgcgtatctttctgaaaaataccctcgcttatgatacgtgcggctcttctgttgtcggcagtcgtgtgttttttgcagccttttcgcgcgtcggcgacagggcaggctgccgaacggcttgtcgtcgggcgcgatacgatgcagttgttcgcactgccgctggcgacggcggattccgccgtgctcgcccggctcgaaaaacggctggacgaactcgatgcctccggctctacggcttgcaggcgtcgctgtatcggtgtctggcggctggacgacgagggcatcttgtggcttgagtgcgtgaacaccgaggacggcgacgtcgtattttccggagcggagctggttcccgaatttgcagcgggatcacgcgcccgggccggctggttcagcggagagatccgctatggcacggggaatctggtgtattaccaacacgatggatttatgcggaatctcgaacgcgaatgggtggctgcggtgtccgaggggcgcgtgagtgagacgaaagcctaccggaaccggctgtatgaaagaggtgcggatgcgacggacaatgcacagcgtgtggccgcggcgttcgacagccttcatgtcggaaagtcgcccgatctgctgtcgctgtatgtggtctttgcagccgattccacagggcgggtggttcggatcgaccgggcgcgactgttgtcggaaaagggaagtcctgttgtcagcgatccggctgacccgctgttgcaggcagctctgcgggcgtttcgctcggtgtcgcgctgggatgcctggtgggtcggagagacctggaaggaacaggcgtattttattccgctgcgcagggccgggagggtttggaaaccgcgaagaggataacgatgcttattgctccggcttgcaggggagcgtgaaccagaaggtcgagcctttgcccggtcgggattcgacgccgatgcggccgcccatcgtttcgacgatcgacttcgagatcgccagtccgatgccgatgccctgcctgaacgatcccgccttgacgaaacgttggaaaagctgtccccggtgttcttcggggatgccggctcccgtgtcggcgacgtagacgtagagttccccgccgcggatttcgaacccgaaatcgacggaaccttcggaggtgaatttcacggcgttgctcaaaaggttggcgatcacctgaatcagccgtttgcggtccgtgcggatgtagcggacgggatattttctgtggaaggtgatccgcaccgggctgttctccggctgccgcatgcggaaaccgccttccagctcttccatgacggcattgagttccacgtcgctatattcgtagccgagggttccggcttcgatcttcgagagatcgaggatgtcgctgagttgctgcatcagtacctcgccgttggagcggatgatgcgcatgtactcctgtttctcggtcggggcggggtcgtccatgagcagttccgagaatccgatgatggcgttcagcggcgtgcgcagttcgtggctcatgttggccaggaagcgtgatttcatgcggtcggactcttcggcgcgaacgcgggctttctccagttcgcgctgggtgcgtttctgggccgagatgtcgcttacggtcagcaccacccggggttgtcctgcgacggtgaggaaattgcccgccacgcttacgtcgcagtcgacggtctccgtgtggtcgtcggaggtgtagagcaccatcgggacctccagtcccgagaagcctttcttcgtccggaacaccccggtgatggccgcgcggacgggacagtcggcgcacaattcgtgcgtgccgcagacgccggcgtcctcgccgttcctgcagcgcagcaggttgcccaccttgggcggcacggcttgcggtgcggttcccgtcgcggagcgatagttggtttgcagaacgttgaaatcggggtcgatcagcagcaggtaggcggctacgttgcggaatatgcagtcgttgatccggtcgcttgttcggatgtaccggcgctggtagcagatacggacggccaggaggacgcaaaacgccgccagcacccctgttcctattacgtataacaactgcatccgattattcggttttcgtttccgatcccaaaggtaggtaaaatccggtgaaataggagggtaaatgataaaaaagacatccggaatcgtccggatgtctttttttgtcggtgggggatctttctatttgttgatcttggcccacgagtccttgagcgttaccgtgcggttgaacaccagatgaccgggggtcgagtcggtgtcggggcagaagtagcccacgcgctcgaactgtacggcctggcctacggggatgtcgcgcagcgacggctcgaggtagcctgtgattttgaccattgattcgggattgaggttgtcctcccaggtctgcccttcgtccacgtcgtcggggtcctccttcgtgaagagcgggttgaacagccggatttcggcctccacggcatccgcggccgacacccagtggatgacgcctttcacgcggcggccgtcgctcgacgaacctccgcccgacatcgggtcgtaggtgcagcgcagttcggtgatgttgcccccctcgtccttgacgacctcctcgcacttgatgaggtacgaatagcgcaggcgcacctcgccgcccggcgagaggcggaagaacttcttgggcggattctccatgaagtcgtcgcgctcgatccagatcaccttcgagaagggaacctgccgcgtgccggcggcttcgtcctcggggttgttgatcgccgtgaacagctcggttttgtcgtcctcgtagttcgtgatgaccaccttcagcggattcagcacggccatgcggcgctgggcgacccggttcaggtcttcgcgcacgcagtattccagcttcccgaggtcgatcacgttgtcgcgcttggcgacgcccaccatctcggcgaagttgcgcaccgaggcgggcgtgtagcccttgcggcgcagggcgcagatcgtcggcatgcggggatcgtcccagcccatcacggcgccctcctgcacgagcttcaacagcttgcgcttcgacatcatcgtataggtgaggttcaggcgcgcgaactcgtactggtgcgaggggaaaatgtcgagcgcctggatgaaccagtcgtacagcggacggtgcacgtcgaattccagggtgcagatcgagtgggtgatccgctcgatcgagtcgctctggccgtgggcgtagtcgtacatcgggtagatgcaccatttgtcgcccgtgcggtgatgctcggcgtggatgatgcggtacatgatcgggtcgcggaacagcatgttcggatgggccatgtcgatcttggcgcgcagcaccttggctccgtcggggaactcgccgttcttcattctcgtgaacaaatcgaggttttcctccaccgaacggtcgcgccacggcgagggcgttcccggcacggacaccgtgccgcggttttcgcggatctcgtcctgcgtctggtcgtcgacgtaggccagccccttcttgatcagttcgacggcccattcgtagagctggtcgaaatagtccgacgcataacgctccagctcccactggaagccgagccactggatgtcgcgcttgatcgagtcgacatactccacgtcctccttgacggggttcgtgtcgtcgaagcgcaggttgcacttgccgccgtatttcttcgccagtccgaagttgatgcagatgctcttggcgtggccgatatgcaggtaaccgttcggttcgggcgggaaacgggtctgtatgcgcgtttcgcccccggcgatcgactcttcgatgatctcttcgaggaagttcagcgacttctcccgtgtttcgtttgtttcgcttgccatattattttttatgattcttgctgttgtaaacggttttgagcagtttcacccccacgaccagcatttgctgggttcccagggccgtgccgtcgtggtgggcggcgaactccgcgcggaccgagaccgtgtcgtcgaagaacgagcggcggtaggagagcgccgtgcggctgtacaccttctggtcggtgcggaagaaactctcggcggggtacaactcgcggccgtaagggagcggtgtgccgtcttcgagttcatgtccgtagaagaaggggtggatgttgtccccgacatagaggcgttcgtcgagcgacagtccccagcggctgatccggaaggcgaactcgcccatgcagggcttttcccacgagtggccgaaactgcggtcgcgctgggccgtgagcaaagctcccagtttgatgtcgaaatcgaagaaggcgttgaaccgcacgccgacgcagggggtgagcagttgcaggtcgacgacgttttcgatcggcgcgccctgctgtcccgcatagtggaacatcgagtagttgaacccatagtagaacgtgtcgaggtagtggcgtccggcgagcaggatgcggaacttttcgcgcgagagggtggaatacatgccctcccagtcgcagacgaactcgacataggagtcccttttgccgttgtactgcgccagcacgccgttcatgcggttgtggaagaagcgttccgactcggagaagaatgccgtcgaatagtcgtcgtcgtgcatcatgtcgcgcgtgaagataccggctgcggccgtcaccttgggcgtctggaactggtagtagaagacgggtttgatctccgaaagataggccgattcctgggttccgaaattcttgatcatgtccgcggcgatgaccagcgtgtttttctcgtcccaccggatgccgacacggggcgtcagccgggccgcgaagtccgtgcccgattcgatgtccagtcccggcacggcgaactcgttgctgccgaattccttgttgtcgaaatacattttgaaatcggttcccagcagaatctcctgtgcgtgtcctgcggcgacgcatccggaaagggcgagcaagagtaaaagttttttcataggtgtcaacggaatatagctgacaaaagtaaggaaaagattttaattttatttacttttgcccccgaaatcaatcgttccgaacccattatgcgcaaaatcaccaacgaagaactcggcaggccttcggccgaggagttcgccgcgatggaaaagatgcctgtcacggtggtgctggacaacgttcgttcggcccagaacgtcggggcctttttccgcacgggcgatgctttcgccgtggagcggatcgtcctgtgcggcatcaccgccactccgcccagccgtgacattcacaaaacggctctaggggccgagatgaccgtgccctggagttattgcgcttcgaccgtcgggtgcattgcgcagctgcgtgccgaaggatatgcggtctacgccgtggagcaggtcgagggggccgtgatgctcgatgagtttcgcgccgtgccgggggtgaagtatgcgctcgtcttcggcaacgaggtcgacggcgtgggggaggaggccgtcgaccggtgcgacggggccgtcgaaatcccgcaggccgggaccaagcattcggtcaacgtctcggtgtcgggcggcgtcgttttatggagtttcttttgccaaatccgtccgaagcgttaactttgccgcgttgtaaaacttaaaatctgaaaaaatgtcagtagaaagcaccgtccgcgcggtaacgacttaccgcctgacggagatgaaacagcggggcgagaagatcgccatgctcacctcttacgactattcgatggcgaagatcgtcgatgccgcgggtatcgacgtgattctcgtgggcgactcggccgccaacgtgatggccggttacgagaccacggttcccatcaccctcgatatgatgatctaccacgcccgttcggtcgtgcgtgccgtggagcgggcgctggtcgtcgtcgacctgccgttcggaacctatcagggcaactcgaaggtggcgctcgattcggccatccgcattatgaaggagaccgaggccgacgccgtgaagatggagggcggcgaggagatcctcgaatcggtccagcgcattctctcggccggcattcccgtcatgggacacctcggcctgacgccccagtcgatccacaagttcggaacctacgccgtccgcgccaaggaggaggccgaggccgaaaagctgctgcgcgacgcgcacctgttgagcgaggcgggctgtttcggcatcgtgctcgaaaagattcccgcggcgctggccgcgcgcgtgaccgccgagattccgaccccgacgatcggcatcggcgccggcgcgggctgcgacggccaggtgctcgtgatccacgacatgctgggtatcaacaaagggttctcgccgcgcttcctgcgccgctacgccgacctgcacacggtgatgaccggtgccgtggagcagtatgtcagggatgtgaaggagtgcgatttccccaacgaaaaggagcagtattagtccctgattccttatacacgcaagccccggctggaacatttcagccggggcttgcgttgcagaaggctaaagaaggctatttgatcgtcttgtgcagggcctcgtagaaatcgggtccttcgcccgcgtattttccgatgatgaggccgtcgggaccgatgatcaccttggtggggtatccgctgacagcatattcgacggagatgtcttccgctgccggaacgtctttcggattgtagacgttgatccacggcagccggtgttcttcgaccgcggcgagccatctctccggagtgtcgttgcagtcgatgccgactatttccagtttgcttttataacggtcgtagtatctcttcatcttcgggattcctttgatgcaccatccgcaccagctgccccaaaagtcgagcacgacatactttccgcgaagcgacgagagggtgaaattcttatcgtcggcggttttcagcgtgaagtccggagcggggctgccggcgacgatcttcgcttcggccagccggatcaggcggtattttccggctttggccagcagcggttcgagcaatggcctaaatatcgagttgcgggccgcatcggcgagtcgttcgtggtatgttaaaacgctgtcgatgggtattttcgtcaggcagtaccctgcgagcgggttgtccggattggcgtcgatgtagttcatttcgcaagcccggcggcgggccatcacctgccggaaccgctcgtagagcgcttcctgttccgcgcggctttttccggccatggcatcctgcaatcgctggccttcgatccagaaggaccgcaattcctgataatggcggctgtgatcttcgttgagacgtgtgcccgaaagcgtgcagttgaaaaccgtcgagtcgatccggccccggagtacggcgtgttcgcccttgtcgaggaataatttcatgtccgaagtgctggtcgaatggcgtcttccctgatcgaattccatgagctgcatggggatgatgatgaattgtgtcggccgctcgacgggcgtgtcgtatgcaaatcgcccgttggcggcgacgatcgtgtcgtaggagatccgttggtcgtcatctcccttgaggccgggcatatcttcgatcgcgcagtgcacgatgcagagtgaatcgttggtcaggctgtcgatatgccccgtgatcgtatgtcggggtgcgcagccggcgacggcggccgcaagcaggaggagcaggtctcttttcatttcgggatggtgggtcgattttgcattcaaagataacacaaaaagtcttacgccgaacctattgatagaatgttgataaaaaaatcggcggataggtccggaaattaggccgtttcgaaaaaaatcactacatttgcgagcaacaaaaatccacgttcattatgtcttttatcaatgaaagggttcagcccgaaggacttaccttcgacgatgtgctgcttatacccgcctattcggaagtgttgccgcgagaggtcaatgtccagacccgtttctcgcgaaatatctctctcaacatccccattgtgtccgccgccatggacacggtaactgaagcgccgctggccatcgccctggcgcgggaaggaggaatcggcgtgatccacaagaacatgaccatcgccgagcaggccgcgcaggtccgcaaggtgaagcgcgccgagaacggcatgatctacgatccggtgaccatttccaaggaccacaccgtcggcgacgcgctgaacctgatgaaagagaacaagatcggaggcattccggtcgtggatgcggacaggatgcttatcggcatcgtcaccaaccgcgacctgcgtttccagcgcgacatgtcgcgccgcatcgaggaggtgatgacgcccggcgaccgcctcgtgacgacgcacaatcccgaactctcccacgcccaggaaatactgctcaacagcaagatcgaaaagctccccgtggtggacgacgcaggccgtctggtggggctgatcacttataaggacatcaccaaggtgcaggatcaccccaatgcctgcaaggacgcgaagggccgcctgcgcgtggcggccggcgtcggcgttacgcccgacgcgatggaccgcgtgaaggcgctggtcgccgaggacgtcgacgccgtggtgctcgactcggcgcacggccattcggccaacatcgtttcgatgctcaagcggatcaaggaggtttatccgtcgctcgacgtggtggtgggcaacatcgccacgggcggggccgcgcgctacctgatcgagaacggcgccgacggcgtgaaggtcggcatcggtcccggttcgatctgcacgacgcgcatcatcgcgggtgtgggcgttccccagctgacggccatctacgacgtggcctgcgtggcccgcgagagcggcgttccggtgatcgccgacggcggactgcgttattcgggcgatctggtcaaggcgctggctgcgggcggcgactgcgtgatgatcggttcgatgttcgccggcacggaggaggctccgggcgagacgatcatcttcaacggccgcaagttcaagagctaccgcggcatgggctcgatcgacgccatgaaggccgggtcggccgaccgctatttccagaagggctgcgaaggcaacatcagcaagctcgttcccgaaggcatcgccgcgcgcgtgccgttcaagggctccctttccgagacggtttaccagctcatcggcggcgtccgttcgggcatgggctactgcggcgcgaaggacatcgagacgctcaagcaggcccggttcatccgcatcacggcttcgggcatgcaggagagccatccgcacgacgtagccatcacgagcgaggcgcccaactattcgagcgaacggtagatgggactcccggtttcgaaatacgactggtggattctggcggcggcgttcgcactgttcgccgcatggctgatcacccgccttccggtgctgcgtacgctggtccttgcggcggcgttgggttatcttctccggcgcgtgtgggtgggctatcgaaattttggaaagtaattgaacgactgatatggaaaaaatcctgattctcgacttcggatcgcagtacacgcagctgatcgcacgccgtgtccgcgaactgaacgtctattgcgaaatccaccccttcaacaaaattccggcgatagacgcgtcggtgcggggcgtgattctttcgggcagtcccttctccgtgcgggacgcacaggccccgactcccgacctttcggccatcaagggcaaactgccgctgctgggcgtctgctacggcgcgcagttcctcgcctcggctttcggcggcgaggtgcagcccgcgcccagccgcgaatacggccgtgcgatgctcaccgtgggcgacgcctcggatgcgctgatgcgcggccttccggcccgcacgcaggtgtggatgtcgcacggcgacaccattacgcgcgtgcccgacaactatgaactgatcgccagcaccgaggacgtgcgcgtcgccgccttccacgtcgggggcgagcagacgtggggcatccagttccaccccgaagtgtaccattcgaccgacggcacgcagctgctcaaaaacttcgtcgtggacatctgcggctgcgggcagtcgtggacctcggagggttttgtggaggctaccgtgcgcgaactgcgcgagaagctgggcgacgacaaggtcgtgctggcgctttcgggcggcgtggattcgtcggtggcggccgtgctgctgcacaaggccatcggcaagaacctctactgcgtcttcgtcgactcgggcctgctgcgcaagaacgagttcggggaggtgctggagtcctataagcacatggggctgaacgtcaagggcgtgaatgcctcggccaagttcctgggcgatctggcgggcgttacggaccccgagcggaagcgcaagatcatcggccgcgacttcgtggaggttttcaacgaggaggccattcagatcaaggacgtcaagtggctggcgcagggtacgatctatccggatgtgatcgagtcgtgttcggtcaacggcccttcggccacgatcaagtcgcaccacaacgtcggcgggcttcccgagaagatgaacctgaagatcgtcgagccgctgcgcctgctgttcaaggacgaggtgcgccgcgtgggccgttcgatgggcatttccgaacagctgatcggccgccatcccttcccgggaccgggccttgcgatccgcattctgggcgacatcacgcccgagaaggtcgaaatcctccagaacgtcgacaaaatctatatcgactcgctgcgcgccgccgggctgtacgaccaggtgtggcaggcgggggctgtcctgcttccggtgaagagcgtcggcgtgatgggcgacgagcgcacctacgagagctgcgtggccctgcgcgccgtgacctccacggacggcatgacggccgactgggtgcacctgccctacgagttcctggccaacgtgtcgaacgacatcatcaacaaggtcaagggggtcaaccgcgtagtctacgacatctcctccaaaccgcccgcaaccatcgagtgggagtagggggattcccgttatgaaaaaggaccgcatccgcgggaaattcactgttgtaaacgaggtttcggtttccagaccgtcgcctcgtttgcttttgtttatatgcatcgttctgaactgcaatccgcagcgggcgtttcgcctattccgaccgtcgtcatggaaattccgaaagaggtctgcaacctcaaggaccgccgcagcgacctgtacgaggtgcgggtgaaaaaatgaaggacacggtgacgggcttgaaaacggggagcgcatgcgggccttgattgtcggggcctgatgcggccgggcattatgccgcagtgtacgcgcattttttgtttaggacgggctatggaaaagccctgggggcgatgcccgatatgattgtttcgctgtaaacagcgtgcatggctttttgtgaatcttcttgccgcatggctaaataatgagccggcgcagacggtagacgtaatggtctacggcatgcagtccggcagcgaaaccttttctgtgcacccttgcaacgagtccggcaacgcccgaaataccgtatgtgacgcaacacattgataaaaacgcagcacgcgagcgcccttgggctccgcgctggaacatggatacggacgtgcgtgctttttcgcactcctgcaagacaccggtaagacttaaatcggaattatagacgtattcacattgccattggtcggcaagtaaattccccccccccacgggttaggaacgtttcattcgtgaatttccatggagcgtccggcctgttccccgactccttgcagagcaggcaggccatgaaaaccgttagcagtatgaataccgatttacgcattccgacaaactgaatccatatacaaaattaacggttcatacgggaccggcaaatttttcggcgatttatgccggaaacggagatgaatccgtccgaatgcagcatattgccgtatgcttcgatcggattctgttcgggaatgggcgagaaggcgagagactgcatgttgtaattcagcatgatgcgcaatgaaaggcaaaaaaagtaaacgaggcgacggcctggaaaccgaaacctcgtttacgatagtcaatagtgaactctccgcggatgcggtcctttcttgccgctgcggggttatttcaccgagacgggcagcgtggcggcgatgtcggccgacgaggttcccagcgaaagggtgtattcgcccgggttgaccttccagccgcgcgactgcgtgtcccagaacgccagcgcctgccggtcgagttcgaactccacgacggcgcttttgccgggggccagggtcactttccggaagcctttcagctcctttttcggccggaggaccgtcggggcgttctccgtgacgtagagctgcacgacctccgcgccctcgcgatcgcccgtgttggtcagcgtgacgctcactttcagcggcttgtcggcggggaacgccttcggggcgcggggtttcgaaagctcgaacgtggtgtacgaaagtccgaatccgaaggggtagagcggtgcgatgcccttggtctcgtaccagcggtagccgaccagcaccgactccttgtagtcgatgtcgtagagctggatcaggcgttcgttgtaggcgcggggcgccttgttgtagaactccgcgccggcgggcatcgtgcctttggcgggggagtcgttgaactccttctcgatggtcatgggcagtttgcccgagggcgacagtttgcccgaaagaatgtcggccagcgccgtgaagccgctctggcccggataccagccgtagatcaccgctgcggctttgtcgttccagccgcccatgcggattcccgaacccgagttgaccagcacgatggtgttgggattggactcgacggccgtgcggatgaaggcctcctcctccttgggcagcgcgaaggggcgttcgaacgactccacgtcgatcgtgcccgtcgagagcagcaccacgtcggcggcggccagctcctcgcgggagggtttttcgacgacgcggaccgcatcgccgtagacctcgcggagcgccgcggtcagcgtcacgttgtcgtagcccagcacctcggccgaggacgacgtgctgcctcccgtgcggggaatctgctcggtgaagcgtcccgtcagcaggattttgcggccttcggcgaggggcaggatgccgttgttgcgcagcagtacgatgccctcggcggccacgtcgtagccggtctgcttgtgcgccgggaatttctccagcagggcgggaacgtatttctcccggtcgtaaagtccgaaggcgatgctcgtggcgatgttggggcggatcattttctcaatgtccttttcggtgatgcggccctccttgagcagcgcgcgcacctcgccgaagaactccttgcggcccggcatctcgacgttctggccgctcttgaccaccttctccgtgtcgttcaccgacgaccagtcgctcatcacgcagccccggaatcccagctcgccgcgcaggatgcgccggatcaggtcggcgttctgcccggcccactcgccgttgaggcggttgtaggaggtcatcacgtaacccacgccagcgtcgatgccggccttgaacggcggcaggtagagttcgtgcagcgcccgttcgtcgacgatcgagttcgagcggcggcggtaaaattccgtctcgttgcagatgaagtgtttcagacacgccacggttcccgtcgactgcatgcccttcacatactcggcgaccatcgccgaggcgagcagcggatcttcgcccatgtattcgaaattgcgtccgttctgcgagttgcggtagatgttcatgcccggacccagcaggacttcgatgcctccggcgcggcactcttcgcctacggcttcggcataacgataggccagcgacgggttgaaggtcgctgcgagggagatcgggcacggaaaggccgtcgaacgctccagctggcggaccatcgtcgggtcggacaggttgtcgcgcatgtgcacgccctgcgtggcgtcggagagatagatgtagggcatgcctttctcgggcacgccgtagaagaagaacgaggagtagccgcgcatgaacgagatcttctcgtcgagggtcagctgtgcgatccgggcgtcggcctgccggtaggcctcgtcccacgctacgacctgctgggcggcggccggtgcgatcgccgcggctgccgttgcgaaggcgagcaaaagttttacggaggttttcatcgttttttgaattggtttgcgtttctgtcttctgcaaagttagcgcatgaacggcccgccggaacggctcttcggaaaaatataaatgatatgaactgtcagttttctgaaaaccagttgattgatgcttcagatggcgttgaattatacaaataaaacaggcctgataatttgcttttgcatgctttttatcgttatatttgtgcaaatccgttgcctgaaatgaaaaaactgcctctccttttcgcggcctttctcgtcgtctccgcatccggtctgcgtgccggggaaccttcggacatacatacgctgcttcgccgcctggacggtctgctcgaccgccgcgaggagttcctgctccgtcacgaagcgcgcctcgactcgctcaaatccctgctatgcggcgacaccctcgggttcggggcgcgttatgccgtcacggcggagatcgcggagcgttatttcgcctaccagagcgactcgacgatcgcctacctgcgccggaatgtcgcgctggccgaaagggcggggaatgccgacctgacgatccgcgccaaatcggtcatggcgatgtgttacagcatgaacggccgcttcctcgaagccgaccgggtgctggccggggcgaccgacacgctgcatatgagccgtgcgacgcaggcggcctattatgccgcgcagcatcgccagaaccgcgagtgccgcagccagagcgagccgggggcggagcgcgaccggtttcgggcctgcgaggagtactacgcccgccgtgcgctggaaaccaccggcgacatttcgaaacgtttctatttcgcctacctcgtcgccgtggacgaaggggattacgaccgtgccgccgcggcctgcgacagtgcgttggcatgcgctccgcccgcgtcgcacgactatgcccgggcggcgttctaccgttcggagaccgaaaggttccggggcgacgaagcggctcgtttcgaatggctcgtgcgcgccgccatggccgatgtgcagggggcggtccgcgactacggcgccttgggcggcgtggccgaagagctgctgcgccggggcgacgccgcacgggcgatgcggtgtatccgcgttgcgatcaacgacacgcaggcctacaattcgcctatccgttcgtggcgcgacatggcgattctgccccagatcgagcaggcgtacagcgagcgcaatgcccgtctgcgcgcgatgtacgtcgcgctgatccttctggcctttcttttcgccctctcggcaatcggaggcgtgctgttcgtcctgcgccagaaccggcggctcaacgccgtgcagcagaccctgcgcgagtcgaacggaaaactggccgagctggctgcgagcctgcgcgaaaccaatgccgacctgagccggcagaacatccgcatcgccgacgccaaccgcatcaaggaggtttatatcggcgggttcctgaagacgatctccgaatatatctacaaactggccgacacctaccgtcatgtcggccggatgctgcgcgacggccgttccgacgagctgcgccgcgagtacgccggaaccgatgtccggagcgacgaactgaaagagttctaccacaatttcgacaccaccttcctggggcttttcccctcgttcatcggggagttcaaccgtctgctcgccgacgatgcgcgcatcggggtccgtcgtccgggaagcctcacgaccgaactgcgcatcttcgcgctggtccggctgggcatcaccgacacggcgaccatcgccgcactgctgcactgttcggtcaatacggtgtacagctaccgttcgcgcatgcggttgcgttcgctcgttccggagcgggatttcgaacagcgggtgcagtccatcggtctcggggacgatgccgcggagctttccgggacctgatcggaacggggcctcttgtcggcgaaacacggagttttttcgctcggggtgtacgctccgacgcggaaatgcgtatatttgcagcacgcatataccgatacgatgaaagattttgcagccatagatttcgaaacggccaacggcaagcgcacgagcgtctgctcggtgggcgtcgtcgtcgtgcgcggcggcgaggtggtcgatacgttttaccgcctgatccgtccccgtcccaatttttacagccatttcacgacggccatccacggtctgcgctatgaagatacggctgatgcccccgatttcgcgtcggtgtggcgcgaaatcgaaccccgtatcgaggggctgccgctcgtggcccacaactcgcccttcgacgaaggctgcctgcgggccgtcttcgaactgtacggcatgccctggcccggttataccttctactgcacctgtcgggcctcgcgccgcaccttcggcagccgcctgcccaaccatcagctgcacaccgtctccgccgcctgcggcttcgaactcgaaaaccaccaccacgcgctggccgatgccgaggcgtgcgcgcagattgccctgaaaatcctgtaatatatataggtgtcgcccgagaagtctgatttttacgatttcacccctgccggagagcttccggcaggggtgacttttttcgggggacttttcggacggatttttcggacggcctgttctctccgtcaaagccccagctccagctggaagcggatctcccagcggttgtaattggggtctatggacctgctccgggtgttgtacgacatgtcggcctgcactttgaggctgtggccgatgatgtagcgcgtgatgcccagcgtggtctggttccagttgcggtatccggccagcggctgcacttcgctgtccgggaacagcgtcgagttgcgcagggcgatttcccattttttgttgaacaggtagctggtctgcacgttgagaccctgcccgttgtagacgaaggctccggtttcggggctgaacagcgggtcgctgcacgaacggcccatgaaatcggtgtagaaggcgaagccccggtattcgaggatgaaatcgacgaaataggaccccaggttgcgtgtggcgtcgccgggcatcacggctccccgctgacccttcagccgcgaggccttgtggttgtaggagtaggctccggcgagcagaatcttcacccgctcctcgaattcgtagttgccctcgatgacgtcgcccttcgacttgaagcgtcccagcggatagagttccagacgccccgtataggccagccctccggtcggcgaactgccccagttgcggccttcgcccagcgtgacggagccctttgccgagaggttgaagccctcgccgtggcgcatgttgtattcgccgaagaacccgaagtcgcggtcgaggttgaattcgctgttgacgatgctccggtcgacgaattgcagggcgctcgacgagttgatccgcgcgcggttggccttgatcttggtctgcccgaagccgatgttccaggtggcgttgggcacgtagtagacgatggcgtcgcgcacgatgttcatgtcgccgtcgggcagcggctctgtgtcgtaggaggtgaatcccagctggaccgagtagaccagtttgggcgaatagatgtaaccgtcgaagcgcagccgcagccgtttgacgcgggcctcggtcttggtgagcgtgaagtcgtcgtcgaacgacagcgccagaaggttctgcatgcggaagcgcatcgtcagttcgaaccagtcgtttttgggccggaaggtgatgcccttgccgatctcgatgttgggcatgttgcgcagctgtgccagcagttcgccggtcgaatcggccacgatgatttcggtgcggaggttgcgtttctgcgccgcagggacctgcggcctctcctgtgccgcggccagcgaccagcaggcggtcagcaggagcaggatcgggaattttttcatcgtatctttctgttaattctctttcggttgcgtgtcggacaaaagtacaaaaaatatgcagagtccggagaaccgcgatgcaaagttggggcgtaaatctgaaacgaatttgaaatacgggggcggcagaggactttcggcgggtaaaaagatgcggcggaagagataaaatccgaaaaaataggatttctggaataaaatgtgtatctttgttgccaaacaatcgagttttgttttgaatctttctttgtaagtgtttgatcccgcagtccatcgcggtttcccccccccattctcaaaatcgacctcattagcttgctcttttgttgggagcggtgcgccttgtgcgcttcggtatttgcaaaaaaaataattgataaatggccaaacgaattacatcgggaaagagagaaagagagaaattaaagcagaccaaacgtcaggacaagcagaagaaaaaggaggagcgtctgagcggcgggagccgcagtttcgaggacatgctggcgtatgtcgacgaaaacggcgtccttcacacgaccccgcaggatgtgaagcccaaggaggagatcgacgcctcgcagatcgaaatttcggtcccgagacagtcggaaatcgaggaggaggagccgatgagcggccgggtggaatatttcaccgcatccaaaggctacggcttcatcaaggatgccgccggttccgagaaatacttttttcacatcaccaacgccccggcgggcattgccgaaggggaccgggtgacgttcgaactcgaacgcggcacgcggggaatgaatgcagtacgaatagttatcagtaacaaataacacttttttaattaacttatcaagagaatgaacatttatgtttcgcatctgagctggggcacgagcagtgagggcttaggaaatttattcatgcagttcggcgaagtagcgtcggctaacgttattaccgaccgggagacgggccgttcgcgcggtttcggcttcgtcgagatgcccaatgaggaagagggtcagaaggccatcgaccagctcaacggaaccagcttcgagggtcagacgatcacggtcaacgtggctcgtccccgcgaggagcgctcttcgggcggctacggcggcaatcgcggaggcggttacggcggcaaccgtggcggaggctacggcggcaacggcggcggttacggtcgcaaccggtactaattccggattttatttcagaacggatctccgggagagcgtttctccccataccatacggagcggggcggtttttaccgccccgttttttgtttttccctattttccacacgcccagcgacatcgggaaaaagagcgaaaaattacccgcgggacctctgtttttcccgaaaaaagcgataacttgccgccatgaaggagacggtgctcgaaaaactcaaggtgctggccgagtcggccaaatacgacgtttcgtgcgcttcgagcggcgtgacgcgcaagcatcgtgcgggcggggtgggcagcgccgcggggtggggcatctgccactccttcacggccgacggacgctgcgtctcgctgctgaagatcatgctcaccaacgtctgcatctacgactgcgcctactgcatcaaccgccgcagcaacgacattccgcgcgccgccttcacgccgggcgaactggccgaactgaccatcgagttctatcgccgcaactacatcgaggggcttttcctctcgtcgggcgtcgtccgcgatcccgactatacgatggagcgcatggtccgcgtggcccgcgacctgcgcacggtgcaccgtttcaacgggtacatccatctgaagagcattcccggtgccagccgcgaactggtggccgaggccggacgctacgccgaccgcatgagcgtcaacatcgaaatcccgaccgaacgcaacctgcaattgctggctcccgacaagaattacgaaagcatctaccgcccgatgagctacatccagcagggggtgctccagagcgccgaggagcgtacgcgcttccgccatgcgccccgcttcgctcctgccgggcagagcacgcagatgatcgtcggggccacggacgagagcgaccgcgacatcctgctgctctcgtcggccctctacggacggcccacgatgaagcgggtctactactcgggcttcattcccgtcaatccctacgacaagcggcttccggcgctcgacaaggcgccgctcgtgcgcgagaaccggctctaccaggccgactggctgatgcgtttctatgggttccgcgccgaggagatcgccgacgagcagacgccccggctggatctcgacatcgaccccaagctggcctgggctttgcggaatcccgcgttttttcccgtcgatgtcaaccgtgcggactacgaggctctgctgcgcgtgccgggcatcggggtcaagtcggcccggctgatcgtctcctcgcgccgctaccggacgctgacgcagcagtcgctgcggcagatcggcgtggtgatgaagaaggcgcagtatttcatcagctgccgggaacttactgcggggcagggcgtcaacgaactgcgccccgagcaggtgcgccgcctgctgaccgctccgcagcggcggaaaacgggtaataacgaaggccaactgacccttttctgacgcgatgctggttttccgatacgacaaatccttcgacgggctgctgtcggctctgttcgatgcctactcgatgcgggcgtttcccgaggcgctgatcggccccggggaacccgaaccgttttttacggagcgcgtccacgacgttgcgaccgacgaggcgcatgccggccgtgtgtggcggggactggaacggcggctgaccgcccgcacccgttcgatgttcgtctatgcctggcacggggagcagccgcagggcgacctgctgatgctgcgctgtctgcgccgtgttttcgacgagggcggaggcgtcgtggccgaccaggccgatcccgacatgaagtcccttttccagttggcgctcaaggtctcccacgagcgggaacgtctcaaacagttcgtccgcctccagaaagccgccgacgggacctatttcgccgccgtcacgcccgagcacgacgccctgccgttggcggtggactatttcaccgaccgtttcgccgaccagcggtggctgatctacgacaggcggcgcgattgcggctactattacgacgggcatacggcgcggtgcgtcacgctggaggacgaccggggaatgatcgccgacaaacttgccgacgaatggctcgccgaggacgagcggcagtttcagctgctgtggaaaaactatttccgggcgctggcgatcccccggcgcatcaacgaacgccagcagcgccgtatgatgccccgtcgttactggaagcatctgactgaaatggagtgaccggccgggacggggaggccggttttcggtcagacatgcaggttgaacagcttggcgatgcccgtcacgacgatctggacgccgacgcagaaggtgaagaaggcgaccatcttgttgatgacgatgctgccgctgttgccgattttgcggatgatccgttcgccctgcgacaggaacagataaagtatcaggcacatcagtacgatgaccagcgcgatgatcgcgtagaagagcaggccccgcgcccagccgttcttcatgctgaccgacgccatcagcgtcaggatgaccgagacgctgcccgggccgatgctgatgggaaaggtgatcgggtagaagatctgcgactcgatggccgatttgtgaatggggttgacgtccttgccctgcgtccgtcccaccgaggagtccgaatcgccgagccattgcagggcggtgcggcagatcagcagtcctccgcccagttggatgaccgggagcgaaagcccgaaaagcgacagcacgaaatgccccacggccaggctgcccagcccgacgagcagatagtcggtgacgattctgcggatgatcgacctgcggtcctcgtcgttcagccccgacagcagtccgttgaccaggaatccggctcccaccgggttggccaccgggaacagcgccatgaaggcggatatgaacgtgaacagaaacccttcctttaacatcttgaggctcggaactttgtattgcaggcttgagtctggcaagaaccgttccaaaccttccgtcctccgggcggagccatatcgtccggaggcggaagccgttcggtttccggatcacgcgtaatcccggtctccaacgacgacaacaatcgcagaccggaaaagtaaaaccctgcaagtcgttgatcttgcagggttttctgttttatagccgctttgcgtgtcggcttttgcggagaggacgagattcgaactcgtggtacaggttgccccgtacgtcggtttagcaaaccggtggtttcagccactcacccacctctccggacacgccttccggctgttaactccgaaagggtgtgcaaatatagaatctttttagggaaatacaaagaaatgcggtcaaaatttgtatttttgcgtaaatcctcgaccccggtttgaaacgcacccgttgcatattacatatggtgtgctgcttttgtcgcggtatccgccgcagcgcagcctgcgccggaaaaccgcctcgtgcggccgctcgccgaggtgctgcccgaagctgcgccgtgcgctttcccgggcggactgcccccggcggctctcccaagctgtgcacgaccggaacgaatcatcgaaaactggaatagccatgaaacggattctcttgcttttgctggccctcggggccgtttgcagcctgaatgccaaaacccggaaatgcctctaccgtgtgacggtcacgggcaagcgcgccgaatgtccggtcgtgatccgcgatgtgcccgagtgggcgcagagcgccgtcgtgtcgctcggcggcgttcaccggattccctcccagttggaccgggaactgggcgaactggtcttcgtctccggcatttccggcagccagaatttccaggttctctactcctcggaccccgacaagcgcgttttcaaaaaacgcgtacatgcccagatgtggctcaagaaccccgacaagaccctgcgagccgtcggctgcgcctcctcggagaagaacgacatgtaccataaactgcaccaccacggcccggccttcgagtcggagtacgccgcctaccgcatctatttcgacaacaagcagaccgtcgacacctacggcaagaagcgtccgcagctcgagctggccgagacgatgtggtatccttcggacgagcagctctcccgcggctacggccacgacaacctgcgcgtcttcgggtcggtgggcgtggggacgctcaagggctgggacgccgaaaagagaaagatggtccacatcaccgatttcaaacgccgcgaagcgcgcattctggccgacggacccatccgcacggtggtcgaaatgcgggtcgaagggtggcgctacggagggcgcgagatcacgatgacctcgcgctacattctttacgccgggcacggcgacgtgcaggtcgaaaaccgcatcgagggcgacttcaggggactggtcttcacgactggcgtgatgaagatggccgaaagcgaggtctgtaagaacgataacgtgatcgccgccttcgggcgcgacttccccgaaaacgacaccgtgaagtgggagcgcgagagcgtcgggctggccgtcgccgtgccgcagaggcagatcgtctcgcagaccgacgacaagaccagctacctcttccagctcacgcccgatgcccgcggacggatcgactacgcgttcgagatgatctggcgcaagagcgaatggctcaaggaccgcagcgataccgaatgcgtcctgggactgatggagtcggtgggtgcggcccggaccccggtcgtcgtttcgcggatcagacagttttgagaaaaagtgcatcgtttgcgtcaaaaaatccctgtccgataagcgggggcagtgtacttttgtatacctgaaattgcgaaaattttacgtatacgaataaaaccacctctcttatgaacttcagacaagtgacgatttgcgcagccgcggcgctcctggcagccgccgcaggatgccgcgcacacgccccggcctgcaaccttccgttcgagatgccgcaggtcgcccggcccgcgattccttcgaatacggtcagcgtcgccgatttcggcggctcgggcgacggcgacgcgggaaccggctatgcgatgaccctctcggtcacggcgggtgtgctctcgcccaacatcacgggcctgccgaccagctgggctgccggcgacagtacgtggacggcgaccgacgataccggggccgccaggtagccggaaggcttcgcatgaaagaggcgcggaacgttccgcgcctcttttttgccgtttgaccgttgcggaaccggatttgcaggggagatggtaaaaatgtaaatggaattttgtatctttgcatgatatttcgcttgtaatggcagaaaacgagaaaaacatactggagaatatcggagagcaggaatacaagtacggcttcacgacggacatcgaaaccgaaaccatcggcaagggtctttcggaggaggtcgtgcggctgatctccgccaaaaagggcgagccggagtggatgaccgagcggcgcgtggcggcctaccgccattggctgacgctggagcctccgacctgggcccacctgacgatccccccgatcgactttcaggacattatctactacgcggctcccaagcccaaaaagcagctcggttcgatggacgaggtcgaccccgagctgaagcgcacgttcgacaaactgggtatcccgctcgaagagcagatggctcttgcgggcgtcgcggtcgacgccgtgatggactccgtgtcggtcaagaccactttcagggaggtgctggccgagaagggcatcctcttctgttcgatctccgaggcgctgcgcgactttcccgagctggtgaaaaaatacctcgggagcgtcgtgccctataccgacaacttctacgctgcgctgaacgccgcggtcttctccgacggctcgttctgctacatccccaagggggtgcgctgcccgatggagctgtcgacctatttccgcatcaacgccgctggcacggggcagttcgaacgcacgctgatcgtggccgacgagggcgcctacgtgagctacctcgaagggtgcaccgcgccgcagcgcgacgagaaccagctgcacgccgccgtggtcgagatcgtggtcgagcgggacgccgaggtgaagtattccaccgttcagaactggtatcccggcgacaagcagggccggggcggcatttataacttcgtcaccaagcgcggcatctgccgcgagaacgcccggctgtcgtggacgcaggtcgagacgggttcggcgatcacgtggaaatatccgagctgcatcctcgcgggcgacaactccgtcggggagttctactcggtggccatgaccaacaatttccagcaggccgacacgggtacgaagatgatccacatcggccgcaacacccgcagccgcatcgtctcgaagggcatttcggcgggccggagcgagaactcctaccgcggcatggtccgcgtggcgaagggggcggagaacgcccgcaactactcgcagtgcgattcgctgctgatcggcgacaagtgcggggcgcataccttcccggtgatcgacgtgcgtaacccgacgggtgtggtggaacacgaggccacgacctcgaaaatctccgacgaccagctgttctactgcaaccagcgcggactctcgacggaagacgccgtggggctgatcgtcaacggctatgcccgcgaggtgctggccaaactgccgatggagtttgcggtagaagcccagaaactgctggctctccagttggaaggcagcgtagggtagtttgctgtttgcgtctgcaatccggtcgcatgcgataagcccctcccgagggaggggtttagggtggggtcaggcttgcaaacacggcggaacgccgtggaaacgacctgcgagagcgaaaaaaggaaacgagaataatagtaagttgatgatatgttaaaggtaaaaaatctgcacgcctcggtcgacggcaaggagattctccggggcatcgacctcgaagtcagggccggtgaggtgcatgccatcatggggcctaacggctcgggcaagtcgacgctggcgtcggtgctggcgggcaatgagaaattcaccgtcaccgaagggtcggccgagtttctgggccgcgacctgctgtcgatgcccatcgaggaccgggcgcggctggggctgttcctgggcttccagtatccggtggagatcccgggcgtcacgatggctaattttatgaagctggccgtcaacgagcagcgcaagttccgcggcgaggagccgctttcggccgccgaattcctgaaactcatgcgcgagaagagcgccgtggtggaactctcgtcgaaactcacctcgcgggccgtgaacgaaggcttctcgggcggcgagaagaagaagaacgagattttccagatggcgatgctcgatccgaagctggcgatcctggacgagaccgactcggggctcgacatcgacgccctgcgcatcgtcgccacgggcgtcaccaaactccaccgggcggacaacgccacggtggtcatcacccactaccagcgtctgctggattacatcgtgcccgatgtggtgcatgtgctctacaagggccgcatcatccattcgggcgacaagtcgctggccctcaagctcgaaaaagaggggtacgactggctgatcaacgaatacgacaagtgatggagacgattcccgacatcatccgcgggttccgcgcggcggacggcgaggtgctccgcatcgccggggccgaggccgaaccctttgcggcggtcgatccccggcatctgcgcgtggaggccgcggcgggcgcttcggcgcggatcgtcgtgctgcataccgcacccgacgtgtcgtcgctgacgctgacgctggccgaaggggcgcagctggagctgaccgaactgttcacggccgaggcgttcgccgaggtctcggtgaagcaggccgcccgcagccgctgccgcctgacgacggcgctgctgtcgagcgccaacgcttcgtaccgcatcgacctcgacggtgcggatgccgaaaacgagctgggcggggtgttcctcgccgcgggcaatgagcactgcgtggtgaaacttcgcacgggacacaatgtcgccgattgtcgcagcaattcctacatcaaaggtgttgccggcgggcaggctgtcggggagttctgcggactggtctacgtcgctcccgacgcccagcgcaccgacgcccgccagcagagccgcaacatcctgctgagcgagacggcccgcatcacgacccagccgcagttggagatttacgccgacgacgtgaaatgctcgcacggcgcgacggtggggcagatggatgccgaggcgatactttacatgcgccagcgcggtttgagcgaagcccaggcccggcggttgcagatcgaaggattcgtcggcgacgtggtgacccgctgcggcatcgagccgttgtgcggggcgatcctggaacgggccgcggcgaaaatcgaaaccctgtgagaaatgttcgacgttgaaaaaatacgggaggagttcccgatcctgcaccgcgaagtctacggcaagccgctggtttacctcgacagcggggctacggcccagaaaccccggacggtgatcgagacggtcgatcgccttcaccgggagctgaacgccaacattcaccgcggggtgcatttcctctcggaggaggcgacggtgttgtatgaagccgcccgggagcggatcgctgcgttcgtcggggcggccgaaaaggaggagatcgtcttcacggcgggcgccacggcgtcgctcaacacggtggcttacgcctggggcgacgccttcgtcggagcgggggacaacatcctcgtcagcgagatggagcaccactcgaacatcgtgccgtggcagatgctggccgaacgcaagggggccgaaatccgcgtgctgccgttcgacgaggcgggagcgctgcgcacggacctcctgccgtcgctcgtggacgaacgtacgcgcgtggtggccgtcacgcaggcgtccaacacgctcggcacgcggcccgacctgcggacggtggtcgcagcggcgcatgccgtcggagccgttgtcgttgtcgacggctgtcagggcgtggttcacggcggggtcgatgtccgggcgatggactgcgacttctacgccttctcgggccacaaactctacgggccgacgggaatcggcgtgctgtacggcaagcgcgaactgctggaacggatgccgccgttcatgggcggcggcgacatggtcgacacggtgacgttcgcgaagaccacctatgcccccgtgccgctgaaattcgaggccggaacggccaatttcgtgggcgccatcggactgggcgaggcggtgaagttcatgcagcggttcgaccctgcggagatcgaagcccacgaggagacgctgctgcgccgcgccacggagcggctggaggggatcggcggactgcggatttacggcacggcgcccggcaaatgcgccatcctctcgttcaatgtcgagggggtgcatccctacgatatggggatgattctcgacaagctgggcattgcggtccgcacgggccagcactgcgccgagccggtgatggaccactacgggacgacgggcatgtgccgggcctcgttcgcgctgtacaatacgcttgcggaggccgatgcgctggccgccggggtcgaacgggccgtgaagatgctgcgcaactgaaaattaaaaactactacctatgttcatcgtactcgaaggcttggacggagcgggcaagtcgacccagatccggatgttgcgccagttgctcgcagaacgtggcgtggagagcgaatacgttcattttccgcgtttcgatgcgccggtctacggcgaactgatcgcccgcttcctgcgcggcgaattcggcggcgtgaacgaagtcgacccctatctggtggccctgctcttcgcgggcgaccgggcggcggccggcccgcagatccgggcgtggatcgccgaaggcaaagccgtggtcctcgaccgttacgtctattcgaacgtgggtttccagtgtgcgaaactacctgccggcgagcggcgcgaccgcctcgcgcagtggattctggacctggaattcggttacaacgacctgccgcgccccgatctgtcgctgttcctcgacgtgccgttcgccttcaccgaacgaaagctcacggaggtccgcgagggagacgaccgcgactacctgcaaggcagccgggacattcacgaagacgctctcgacctgcaacggcgcgtgcgcgaggtgtacctcgccgccgcggcgaaggacgattcgctgcgtgtggtcgattgcagcgatccgtcgggggcgatgggttcgcccgaacataatttcgaaaaaatacgggccgtgctggccccgatactcgacgcgcgatgagaaagacccggactttcaaaatcgcggccaacgtctgccggctgatcctcgcctgcacgttcatcgtttcgggtttcacgaaggtgatagatccgtggggcacggcgctgaaggtcaacgagtacctttcgatctacggactcgactacctgcagcccggggcgatggtcttttcgatctggctgtgcggcgcggagctgatgatgggctgcatgctgctgttcaaggtccgtatccggctgatttcgatcttcgccgtgctgtcgatggttttcttcacgctgctgacgctgttgagcgccacgctcatccccgtcgaggactgcgggtgcttcggcgaggcgctgaaacttaccccgtgggagactttcgtcaagaacgtcgtgctgctgccgatggccttcgtggtgtggtggcgttaccggcccgacaagattttcgccttcaaaccgctggagatcgtgcttacctgcacgttcttctttctggcgatgtacctcggctattactgttacattcacctgccgctcgtggatttcctgccctataaggtcggggtcaatatccgcgaggcgatgcaggctcccgtcgtcgagccgggcgagtcggaaaccgtgctggtctaccgcaacaggcggacgggccgcgagcgcgagttctcgctggaagacaccgagtggcaggatgccgaaaagtgggagtgggtcgacacccgcaccacgagcgaagtcccggccgtgagacctcttgtgagcgaattcgccctgcgcgacgccgagggcgacgccacggaggaggtgctgacgatgccggggcgggtttacatgctctgcgtcacggctttcgaccgcctgccgcgttcgtgcgcacggcgcatggcccggcttgcggagcgcgcccgtgaggagggtgcgcacgtggtctgcctgacgcccgatccgctttacggcgtcacgtggcacgagttcggcacggtggaggtgcggtgctacaacatcgacgcctcgacgatgaaaaccatgctccgcgccgataacgggcttgtcgtgctgaacgacggaaccatcacctctaaaaagaactgtcgcgatattcgtccgtaggggcatcctgcgggacgctggtatgaaagttgacgccggaaacggtgtcaacttttttcgtatgcgaatcatccccattttagtgatcgccctgcttgccggggcgtgttcccgcaagacgcccgcacctgcggtggtacgccccgtgaaggtggcgacggctgccggcgcggggcttatcgacaaggatttcgccggcatggctactcccgacgacgctgtgaacctcgccttcaaggtggcggggcaggtcctcgacgtacccgtttcgcagggcgcgggcgtgaagaagggggagctgctcgccgaactcgacccccgggacatcgagttgcaggtcgcggcgacccgctcggccttcgaggagacccgctcgcagcagcagcgcatgcagcggctgctggagcacgaggcggtgtcgcggcaggaggccgaagcggccgcgacgcgctatgcgcaggcccgctcgacctacgagaacaccctcgacctgctgaaggacacccgcctgaaggccccgttcgccggggtcgtcgagcgcaagtacgtcgataatttcgaacgcgtgcaggccggacagccgattctccggctggtcaatcccgtcacctcgaccgtccagttcacgctgcccgaaaacgcgctgccgctgttgcgggacagctccacgcgctttaccgtcgcgttcgacaactaccggggcgcggccattccggcccgcctgaaagagtatgtcgaaacctcgtccgacgcctcgggattccccgtgtcgctgactctcgaaaaccccgatccggcccgttaccgcatctcgcccggcatgtcgtgcacgatcaccatgttgagcgccgatcccgttcccgatgccgtgtcgctgcccgtttcggccgtctgcgccccggccgggggcgggacctacgtctggatcgtcggcgcgggcgaccgcgtcatgcgccgcgaggtgacgctcggggagctgttcggccgcgaccgggtggtcgtcgacagcggtgtcgcgcccggcgaacgggtcgtcacggcgggcgtttaccagctgcgcgagggcgaacgggtccggatcttaaactgacgccgccatgaacctgcccgaatattcgctgcgcagcgccaaggtgatctggttcttcctcgccgtgctgctggcgggaggcgccctggggttcgccacgctgggcaagaaggaggatgcggtcttcgtcatcaagtcggcgtcgctcgtctgctcctatccgggggccacgccgcagcaggtcgaggagcttgtcactgaacccatcgaacgcgaggtgcagtcgatgcgccgcgtgcataaaatcacttcggaatcctattacgggctttcgaagatacaggtcgaactggacccggccacacccgccgccgaaattccgcaactgtgggacgaactgcgccgcaaggtgctcaacgtccagccgcgcctgcccgcgggggcttcggcggtgaccgtcgccgacgatttcggcgacgtgtacggcatctactacgggctttcggtcgacggaggcttcacctggtccgaactgcgcgactgggcgcagcggctcaaaacggcgctcgtgacggtcgacggcgtgcagaaggtggccctttacggcgaacagacgcccgtggtgaacgtctatgtcagcatggcgacgctggccaatttcgccatccgtcccgaaaccatcgtcgcgaccatcggccagcagaattccatcgtcgacagcggcgagaagcaggccggaaaactccagatacagattctcgaggacggaacctacaagacgctcgacgacctttcggaccagctgctgatctcctcttcgggcaaacagtaccgcctgggcgacatcgcccgcgtcgagcggggctacgccgagccgccgcagacgatgatgcgcgtcgacggccgccgcgccgtgggcatcggcgtctcgaccgaggagggcgtcgacgtggtgaagaccggtgcggagatcgaatccctgctggcttcgctcacgcggcagatgccgctgggcatggagctgacggtgctctatcccgagaaccgcatcgcccgggaggccaattccacgttcattctcaacctcgccgagtcggttgcgatcgtcattctgatcatcatgctcgtcatgggcttccgcgccggggtgctgatcggcagttcgctgctcttctcgatcggcggcacgctgctcctgatgcagtttctgggcgaggggctcaaccgcacctcgctggccggtttcatcatcgcgatgggcatgctcgtcgacaacgccatcgtcgtcaccgacaatgcacaacaggccatgctgcggggcgcggcacgccgcacggccgttgtcgagggagccaacgccccgcggtggagcctgctgggggccacgctgatcgccatattctcgtttctgccgctgtacctcgccccctcgtcggtggccgagatcgtcaagccgctgttcgtcgtgctggctctctcgctgctgttgagctgggtgctggccctgacgcagacgccgctgttcggcaatttcatgctcaaggtgaaacctgtcgccggcgatccctacgacacgcgcttctaccgcgccttcgaccgcctgctggccgccctgctgcggtggcggtgggccgtcgcggcgacggtcgcggggctgttcgtcctgtcgctggccgtcatggggctgatgccccagaacttctttccgtcgctcgacaaaccctatttccgggccgacgtgctgctgcccgacgggtataatatccgcgatacggagcgtaatctgctcgccatggaggagtggctgcgcgcgcagcccgaggtgaagaccgtctcgatgacgctcgggtcgacgccgccgcgttactatctggccagcagtagcatttcgttgcgtcccaatttcggcaacatcctcgtcgaactgcacgacaagcggcagaccgaggccgtcgaggagcgtttcaacgcctatgtcaccgcgaattttcccgacgtgtggctgcgctcgtcgctcttcaagctctcgcccgtgcctgacgcggccatcgaattcggcttcatcggcgacgacgtcgacacgctgcgccgtctcgcggcccgggccgaagaggtgatgtggcgcacccccggagccgtaaacatccgcaacggctggggcaaccgcgtgccgatgtggcagccggtctactcgcagatgaagggccagcgcatcggtatcacccgcagccagatggcccgcggcatcaccatcgccacgcagggatacacgctgggcgaataccgcgagggcgaccagttcatgccgatccttctgaaagacgagaacatcggttcgtataacctgaccaatttgcaggccctgccgatcttcaatccttcgggcaaggtcttttcgattgagcaggcgaccgacggattccgtttcgatttccggccgggcgtcatcaagcgtttcaaccgccagcgggtgatgaaggcccaatgcgacccgggccgcggggtcaacaccatgcagttgttcgccgcgctgcgcgattcggtggaccgcgccgtggtgcttcccgagggctactcgatgaaggtcttcggcgagcaggagagccagcaggagtccaacgaggcgctggccgaatacatgccgctgacgctggtgctcatcctcatcgtcctgctgctgctgctgcgcaactaccgcgagccggtcgtcattctactgatgatccccctgatcttcatcggcgtggtgctgggactggccgtcacgggcaaggtgttcaactttttctccctgctggggttgctgggactcgtcggcatgaacatcaagaacgccgtggtgctcgtcgagcagatcggcgtgctgcgggccgcgggcaaagacccctacgaggccctgacctctgcgacgcgcagccgtatcgtcccggtggcgatggcctcgggaacgaccattctgggcatgctgccgctgttgttcgactcgatgttcggcgcgatggccgccacgatcatgggcggactgctggtcgccacgctgctgacggtctgcgtcctgccggtggtctacgcgctgttctacaatatccgcaagccatgaagataacagtttcgataatcgccctttggctctgcgtcccggcgctggggcagacctcgctcgccgactaccgcgctgccgtcgccgattacagctggcagctgaagatcgccgcctcgaagagcgatgcggcggccgagacggcggggcaggcccgtacgggctacttgccgcggctcgcgatggacggcagtttcacggcgaccgtgcgccatttcgacggcgtggaacgctggacgttcagcctcctgccgcagctggtgcagaccgtctacggcggcggtgcggtgcgggccgcggcccggcaggccgaactgggctacggcatcgcgctgtgcgacgaggagttttcgcgcctcgacgtgcgctatgccgccgactacgcctactggaacctctcggccgtggaactctatgccgcctcgatgcggcagtatgtcgcgatcatccgttcgctcaaggaggtcgtcgaccgccgcttttcggagggctatatcgccaagggcgacgtgctgatgatcgacgcacggttgagcgaggccgaatactcgctcgtgagcgccgagcagagttacgaggtcgcgctccataacttcaacatcctccgcggaaccgacgccgcgctcggcgtacagctcgcgcagggcatccgcgactcgctgccgatgcccggacgggtcgtggcggccgaggcgctggagcggcgtcccgactatgccgccgcacggctgcgctcggagcaggccgaggcgggaatccgggccgtccgcgcgccgttcaatccgcagttgagcgtgggtgtcggcggcatgtggcagccctattaccccaacagcacgggggcgacctacgtcgacggatcggctttcgtgaaactctccgtgccgatcttccactggggcgaacgccgccgggccgtgggggccgcgcgcgccgtgcagttgcagcaggagtggaacgccgcgctcgtgcacgacgacatcgtgcgcgaggagatgaacggctggacggccctcgtgcagagccgcgcgcaggtcgacgcctcggaagagagcctccgcatcgcgggcgagaacctctccatcagcacctattcctacggcgaaggcctggcgacgatcctcgacgtcctgcaagcccagttgagctggattcagctctattcgaacgccatccgggcgcattacaactatgccgtggcggtgtcggactaccagcgcatcacggcgcaatagaaaaacggcggagaatctctccgccgttttttcctgccgccgggcgttctacgccttcgccggctgggtgctgaccaccgcgatttcgcgcgacacgggtgcgatcctgcgcagcatctgcaccatgccgcagtacttttcgtgtgtcagttccagtgcgcggccgaccttcgcctggtcgtcttcggagctgcattcgacgttgtaaaccacatggaacgagcggtatacgctttcggattgaaccgtctcggcggataaatcgcccgaatagctgatttcgaagcgtttgggcgtgatgcgctctttctgcatgatcatcagcgccgtctgggcggagcattgcgccgcggcgtagagcatcagggtcttgggattcatcgcgtcgcatccggtgccgttttcggtccggaatttcccgtttccggacatctgtaaagttactttttcaatcatggatttcggtttttgtgttcaacaatgacccgggggcaaattccgttcctttggtagtgtgcggatgggcaaaaattcgtatatttgcccgtatttagtgaaacaatgcatatgcgaaaattccggatttcattgctgacccttgcccttgcggcgtgcgccttcggcgcgcaggctgccgggcctgaaatagagaccctcgcggggcgcgcccgcgacctgttcgattacggccgctggagcgacgcccggcaggaattcctgcgcgtcagggcggtgctgacgccttcggaccgcctgctggcccaggaggcggatttttacctggccgcctgcgccgtggagctgggcagccccgatgccgaaggggccttgcgcgaattcgcggagcgttatcccgaatcggtctacgccaacgacgtgcgtttcgcactcggttcgttctactgcgccgcggggaacatggaaaaggcccgcgaggctttcgcgcagaccgattacaaggcgttgagcgcgccgcgccgcgagcagtacgacatccgcatgggctacgtcgcgttcgccgggggcgactaccggaaggcgtacgactatttcgaccgcatcggcagccgcagcgaatacgtcgatcacgcccgttactacaaggcctatatcgactacgccgaagggcgttacggccgtgcgaagcaggccttcacggcgcttctgcgcagcgacgcctaccgcgacgtggttccctactacctcatgcagatcgagttccgcgagggcaactaccgctatgtggtcgaaaacggcgagacgctggcccgccgggccgttcccgagcggcgcgccgagctggagcgcgtggtcgccgaatcgtggttccggctggaggatttcaacaggacgctggagcacctcgcggctttccggaaggccggcggggagatggaccgcgacgccagctacctggagggcttctcgctctaccgcacggcccgctatgcggaggccgcggagtggctgcgcaaggcgtgcggcgccgaagacgcgctgacgcagaacgcctcctaccacctggccgactgttacctgcgcgccggggacaaggagtcggcgatgcaggctttcgcgatggcttccgacgagtcgctcgacgcgacggtggccgaggacgcgctgttcaactacgccaaattgcagtacgaactgggcggcggcgccttcaacggcgcgatcaacgtgctgacgcgctatgtcgaacgctatccttcgtcgccgcgcgcggaggaggcccgtgcgctgctgatcgccgcttactacaactcccgcgactacgatgccgcgtacagggccatcaaacagatgccctcgggcgacgccgacatccgcgcggcgttgcagaagatcacctatttccgcgctctggaggcctacaaggcgggcgacatgcgtgcggcgcagcgttacctcacggaatccgccgcggtgaacgtcagccccaagtacaccgcgctgaatgccttctggcagggtgaaatcgccttcgcacagggcgactacccggtggcggcggccaaatacaacgcctacctgaagcgtgcgccccgcaccgagcgggagtatgcgctggcgtggtacaatctcggttactgcgccttcgaccgcaacgacctggggcaggcgcaggcttcgttccgaaagttcctcgccgcctggtcgccgcgcgaccgttaccgcgccgacgcctacaaccggttgggcgacgcggcctattccgaccgccgtttcgaggaggccgtgggggagtatgacaaagccatcgccctggcgacgcccgaacagcagtacgcccgctacaaacgggccgtgacgctcggcatcctgggccgcacggaccagaagcagcaggccctgcggcagatcgccgcttcgggcggcgactatgccgacgaagcctcctacgagctgggacgcagctacatcgcgcaggagaagtatgccgagggcgccgcgcagctcgaaaagttcgtggccgcctatccgtcgtcgccgcgctgcacgcaggcgctgtccgacctcgggctggcctacctgaatctgggcgacaagcaaaagtcgctcaagtattacgatcgggtgatcggggcgtcgccccactcctcggaagccaggggcgcgatgcagtcgatccgcgagatctacgtttcgcagggcgacgccgacgcctatttcgactacgccgccaaggccggactggagagcgacctgacggccctttcgcgcgactcgctgtcgttcgccgcggcacagaaactctacctcgacggacagcaggaggctgccgcgaagtcgctgcgcagctatgtgcagagctatccgaaggggtattacctgaccgacgcgctctactatttgagcgactgctacctccgctcgggcgagcgcggggaggccatcgagacgctcacggcgctcgccgaccgggggacgacccagtacacggtcgccgtgctggagaagctctccgagatgacttatgccgacgaacgctgggacgaggccgcctcggcctaccgccggctttacgacgccgcgccgaccaaaacgggccgcgaggaggccatgaagggctatgtgcgtgcgacggtggccgggggcgacggggcgaagatcgccgcgatggccgccgacgtctgcgggcacgacgatgcgggggccgcggcgctccgcgaagcgaagtacgcctgggccgggcagctgcgcgccgaaggccgccgcgacgaggccgtgaagctctaccgcgaactggcgaaggacgtgcgcacgaaagagggttccgaggctgcctattacgtgatcgaatccacgttcgggagcggcgacatggacaagaccgaaaaggaggtctttgccttctccgaacgggagccgcaggcctactggctggccaaggcctttatcctgctgggcgacgtgtatgtgaagaaaggggataatttccaggcccgggcaacgtggcagagtgtcgccgacggttattcgcctgccgacgacggcatcgtggacgaagcgaaggcgcgaatcgcaaaactcaactgacgatgaagaagatgctgatagtggccgccttcgcggcggtgctgccgcagttggctgcggcgcaggtcgaaaagcaggtcgaagtgaccaaggcctatgtcccgaaggtggagagcgcctcgaaactggccgtccagcccgacatgaccgacacggcgcgcatgcgccccgaaatcgactacaccattacgccgctgtcgttgcgcacgacgctctcgccgcgtccgatccgccccgcgacggtgacctactgggagttcaaccgaccgctgcccttctacctgaaggccggggcggggtatccgctcaactcggtgctggacttctacgcctcgtcgcagaatccgtcgacgggctacgtcgtggggtacgtcaaccacgaggggcggtacgccgatattaaaaacgatttcggggtgaagaacaattcgacgcggatgttcaaccgcatcggggccgccgcgggcaagtatttcggccggcacatcctcgaaggcgacatttactacgacaaccggatgtatcaccgttacggggcctgggccgacggagacggcgcgggtctcgggatcggggggatgaacgactacggcgatgcgaacgtcgcggtgcgtttcggagacaattttcaggacctgagccgcacgaactttgaaatagccctgcgcggggggatgttcttcgaccactccgagtggccggattacggcgacaaggcccggcagaccgcactcggggccagggcgaagatcgcccggggattcggccgcagcaggttctcgctcgaagcgggatacgaattgcggtccgggcagaaatcgctggagggcagcagccagcagctgatccacgccgccctgcgctacggtttcgccggcggggtcgtgcgcttcgacgtgggggccgactactaccgcgaccggaccgagttcgaaggagaaccctcgaacctcgtgaagagtgaaaattatgtcattcctttcgcccggctcgatttcaatctcggaacgccggggctgaaacccttcttcgaggccgacggcgcggtgacgccgaacgacttccgggcgctgacgctggaaaatccctatgtcgcctcctcgacgtggctcgacaaaagttccgtggactacaatttccgtctcggactgggcggcagtctctggcgcagccgcttcgactaccgtgtctacgccggggtgtcggtccgcgacaaccatcttttctggaccacgtaccggagtttgtcggacgatcctgctttttcggaggtttttcagggcgttctggtccctgtgatggcgcggcagaccgtcacttcgttcaacggcgagatcgagtttcggcccgtgagtgcgctgaaattcgacctggacgtgcacggctatctctataacgacgagacggatctgaaaaacggcgctccgtcgttcgccgggaacgtgggcgtcgcctacgagggccgcaaggtctcgttcggggtgaaggcgctgatgcagggcgtgcgccgctggacggtgatcgacctttcggctacgaccgacgcttcggaaccggtctgtggtccgtctttcgaagcgcccttcggcgtggacctgcgggtgaatttcgactggaaggtttcgggccgcgtgacgctcttcgccgagggccgcaacctcgtcaaccgccgcctgtacgaatacccctggtatcccgaactgggagccaatttcacggtgggcgtcaaggccaatttctgaaaccgtttccgccgggagcggttttccggaacgggggctttttcgaaaagcccccgtttttttgcccctcgcgaaagacgacaattcgtttaattgatgatcattttcggctgtcgggaagaaccgaccggaaatttcgctatattggagcgaatttaattcacacgactatgaaacatacaatgcccgagcttccctatgcaccggaagcgcttgctccgaagatgagcaaagagaccttcgattaccactatggaaagcatttgcagacttatgtgaacaacctgaacaacctgatcgcggggacgccttacgaggagatgccgctcgacgagatcgttcgcaaggccgatgggggcattttcaacaatgccgcccaggcctggaaccataccttctttttccggatgctgactcccgcgcagcagccgatgcccgcgaaactggccgccaaactcaccgaggcgttcggttcggtggaggctttcaaggagcagttcaccaaggccgccgtggggctgttcggctccggatgggcgtggctggcgatggacaaggccgggaagctgtcgatcgtcgccaagccgaacgccggcaacccgatgaccgacggactgcgtccggtgatgaccgtggacgtttgggagcacgcctattacatcgactaccgcaaccgtcgtcccgattttctggcggcgttctgggagctgatcgactggcaaaaggtcgccgaccgctgcatcccgaagcggtacaagtgcacggcctgcgactacgtctacgacccggcgaagggcgatcccgagacgggcatcgagccggggacgccgttcgaggagattcccgacgactggacctgcccgatctgcggactctacaagactgacttcgaggctgtcgaggagtaaacgaaaaacctccgcgtgcaaacgcggaggtttttttgtgcccgggtcgcgggaacggatcagaagacgaacttttcgattttcagttcgcccagctgttccagacgcggcacgagggtcgtgaagtgcgacgcctgttcgtgggccgcgagggcctttgcattgctccaggtttcgcagatcatcagcacgtcgctgcgcgtggcgctttcgaacaggtcgtaggccacgcatccctcgtccttgagcgaagcggctgccagctccttggctgtgcgcaccagttcttcgcggttgctttccgtcgtgcggataaatacattgagacgtatcattggtttccagttttttggttttgtcgttttgcaaatataacgaatttttcggtgacggtgcgccgtcggcggaaacaaattgtcgacttccccggaaatcccgccggaagtcccgcttctgcggcgtcggggaggagtccgcgagggaaccgtccggcggctgcggggtgcgagttgccggaattttttgtatcttgtgcctttaaccgcattaattatggaactgaacgacaagaaattcgcggtgctggtcgatgccgacaacatctcgcaccgcaagataaaggatattctggatgagatcgccaactacggcacaccgacgataaaacgcatttacggggatttcaccaatccgaaattcgccgcctggaaagaggtgctgctggagaactccatcacgcccattcagcagtacgcctatacgacgggcaagaacgcgaccgattcggcgctgatcatcgacgcgatggacattctgcacaaggagggcgtggacggattctgcatcgtgtcgagcgacagcgactacacgcgcctggccagccgtatccgcgaatcgggccgggaggtgctggggttcggcgagaagaagacgccgaagccgttcatcaagtcctgcgacaaattcatctacgtcgaaatcctcgggcagacgccgccggagaaggcggcccctgcgaagaaaaaggcggacgcgaaaagatccgccggggccgaagcgcctgtgggtccggccgccgaaactgccggggaaaagaaaccgtcgccggatgcggggcacgcctcgacgatcatccgtccgttcgacgacgaattccgcacgctgctggagaacacgatcgacgatgccgccgacgacagcggctgggcctctctgggcgacgtgggcagcgtgctgtcgaagaagatgccggatttcgacccccgcaactacggctacaagaaactttcgctcctggtccgggcgctttccgatgccgtcgacatgaagacggagcagcaacgggtctacgtccgcaaccgggtggggtagggctttccgtatttcgggagggatcagagcgggccgaggctcccgcgggcggcttcgtattcggcgacgagacggcggaggatctcgccggccggcggcaggtcttcgatgagcgcggcgatctgtccgatctccagttccccttcgtcgaggtcgccttcgaaaatcccccgtttcgggcgtccgcggccgatcagggccgacaattcttcggcgtcggcgccgcgcgattcggcctcctcgaccgtgcggcagaaaccgttgcggacgaggcgcgtcgggatcacctttttgagcgtcaggatcgtgccgccctcctgtacctctacgcaccgccgtttgaacgcctcgcaggccgaactctcccgcgacagcgcaaagcgcgtccctaactggcatccttcggcgcccagggcgaaagcggccagcatgccggcccccgtggcgatgcctcccgcggcgatgagcggcaggtcgacggcctgccgcacctgcgggacgagggccatcgtcgtcgtctcctcacggccgttgtgacccccggcctcgaatccctcggccaccacggcgtccacacccgcttcgcggctcttgagcgcgaatttcgaactcgacaccacgtgcgccacgcggcagcctgcgtcgtgcaggcgtgcggtccaggtcgcggggttgcccgccgaggtgaagacggccgggacgcgctcttccgtgatgacgtccatcagttggggcgcataacggtaggccagcggcacgttgacgccgaacggccgggaggaggccgcacggcatttgcggatgtgctcgcgcagcagttcgggggtcatcgagccggagccgatcagccccagcccgccggcctcgctgacggcggcggccagccgccagccgctgcaccagaccatcccgcctgcgacgacggggtagcggatgccgaaaagggtcgtgattctgttttccatcgttttctggttttctgcgggattaagatacaattatttttccaaaacgggagcggatgttccggaaggtatgcgcaaaaaaaagcggcgcttcgacccgtcgggtcaaaacgccgttatgaaaaaaaagggtgagctacttacatcgcaccgctacgaccacatacccttgctcgattcctcgcctgggggattctgtaggagctggtcgtgtaagactcacccgggcacaaaagtaggaaaattttatatctttgcaaaaaaaaactgaaatgcgtaagaaaatattaggttggggtctgctggcggcgttcgtcctgacggccggcgcagggcttgtcctgcggcagcagttctatggaaatgcggtcgttacggagcgggacctctacgtgagcgcccgggccgaatacgggcaggtcgcggactcgctgctgccgcagatcaaacaccgccgggctttcgacgcctatgcccggaggatcaacctgtccgaaaccttcaagcccgggcattacgtgctcaaacacggcatgagcgtcatcgaaatcgcgcgcatgctcaagctggggttgcagacccccgtgcgggtgacgatcaacaacgtgcgcatcccggcccagctggcgcagaaactcgcacggcagatcgacgccgattccacggcgatcatgcaggcgctgacctcggaggagctggccgcggaggtcggattcgacagcgtgacgctcttttcgatgttcattcccgacagctacgagttctactggacggtgacgcccggggagttcgtcaggcgcatgaagcgcgagtacgaccgtttctggacttccgaacgcgatgtaaaacgcaagcgcagcggattgagccggctggaggtgatgacgctggcttcgatcgtctacgaggagacccgcaagagcgacgagatgccccgcgtggccggggtctacgtcaaccgcctgaagaagggcatcaagttgcaggccgacccgacggtgaagtacgccatgcaggatttcggcctgcgccgcatcctctaccgccatctgaaatacgattctccctataatacgtatgtgaacgaggggctgccgccctcgccgatctgcatgcccggaaagaacgccatcgacgccgtgctgaactacgaaaagcacgactatatcttcttctgcgcacggcccgaattcgacggttaccacaacttcgccaaaacccttcgcgagcacaataagaacgcccgggcgtacagcgacgaactcaatcggcgtaagattaaataattttcgtatctttgtcatcccatgcttgcgaagatatacgaacagaacccctcggagaaggagttgcagcgcgtcgtagacgccctggagcgggatgaaatcatcatttatcccaccgacagcgtctatgccttcggctgttcgctgcgctcgccgaaggccatcgagcggctgcgccgcatccggggcaagagcgaggagaagttcaccgtggtcttcgaaaacatcgcccaggtcgcggagtactgccgggtggacaatgccgttttccggattctgaagcgcaatctgcccgggccgttcaccttcgtgctggcggcttcggcgcgcattccggacaaggcgctcgaacggcgccgcacgatcggcgtccgcattccggccagccccgtcgcgcgggccgtggtcggggcgctggggtgtccgatgatcaccacgtcggtcaaggacgacgaccaggtggtggagtatacgaccgatcccgagctgatccacgagcgttacggccgcgaggtcgcgctggtcatcgacggaggcatcggcgacaacgtccccacgacggtcgtggacctgacgggcgacgggccggagatactgcgcgaaggcaagggtgaactgcaatgaagagggggctgatgccgccgcgcggcaaggctggcgcctcggagtgttaaaaacaaaatagaaaaatggagaagaagaatttctggaacgaagccgcgaaatacggcgtgatcatggctctggtcgcgatccttttcgacgtgctgggcttttacgtgcagaacacgctgctgtccctgctgtcgctcgtcattttcgtcctgctgctggggtatttcaccaaacgccgcgcggaacgcttcggagccaggggatacggctacgggcagtgtctgggtttcatggtcagcgtgatgctctgcgccgggtttatcgagggagccttcatgggcgtcgcctccaactggctctttgcggccagatacgaggcgatgatcggtccgtcgatcgccatgctggagaacaccgggttctacacgggcgaccagatcgagatgatgatgaaactgatgcgttcgccgctggtgcagctcttcagcggaatgctcgcctcggctatcaagggcggctttttcggtctgtttattgctgccttcaccaagcgtgatcccgacgttttctcggaaggcactaaccaataaggatggataaactgaatatatcggtcgtcgtgccgctctacaacgaggcggagtccctgcccgaactggcggcatggattgaccgcgtgatgcgcgaaaacgggttttcgtacgagcttattctgatcgacgacggttcgtcggacggctcgtgggaggaggtcgaacggctcaagacgcagtatccggccatccggggcatcggtttcgcgcgcaactacggcaagtccgcggccctctactgcggattcgcggctgcggaaggcgaggtcgtcattacgatggacgccgacttgcaggattcgcccgacgaaatccccgagctgcgccgcatgatcctcgaagagggctacgacctggtctcggggtggaaaaagaaacgccacgacccgatcggcaaacgctggcccagcaaattcttcaactggacggcccgggccgcgtcgggcatccggctccatgatttcaactgcgggctgaaagcctaccgccgcaaggtggtgaaggccatcgaggtctacggcgagatgcaccgcttcattccgttcctggccaagcaggccgggttcggccgcatcggcgagaaggtcgtcgaccatcgcgcccgcaagtacggcagttcgaaattcggcctcgaacgcacggtgaaagggtatctggacctgatcacggtgctgtttatgacgcatttcgggcgttcgccgatgtacttcttcggcagcctcggaacgctgatgttcctcatgggcggcggcacgacggtgtggatcatcgccgagaagctctggaagcagagccacgccctgcccctgcgggcggttacggaccagccgctgttttatctggcgattttggccgtaattctcggcgttcagctgtttttggccggatttttgggcgagctgatcaacagagggtcttccgagcggaacaaatacctgatcgacaaaactttgtaaatgatgatacaacgaatccaaacgctttatttgctgatcattgcggcgcttatggccgtgacgctcttttcggggctggcgtggtttgcgggtgacgccggcgagttcgggctttacgccttcgggttgaaaaccgccgaaggggagcttgtccagtccaccgtctatatgggcgtcctgctggcgctggcctgcgcgctgccgctggtgacgattttcctgttccgtcgccgtttgctgcaaatacgcctctgtgtggtggaaatggtgttgctgttaggctcgctggtgatggaaggcgtctattactttttgagctggcgggtcttctccgacctgacgttccatacgcagggcttcaagcccgccattgtgctgcctctggtctgcctgctgtttgcctatttggcggcccgtgcgattttccgcgacgaactgctggtgcgcgcagccgacagaatacgctgatcgagcggatactgctgacccggagtatgcccgagcgcatgttccgggtcttctgtccccgtcggcgaactgctgttcggacggaaaagggttgcaattcggaccgatctgattattaaaagaatgttacaaacctttgcaggtccggaaaataattttaactttgaggcataatatattgtcattatgtagtgaatttaaagaattttggctacaaacaatacattttttaactaacactcaactctatgaaagtagtaaatttttggaagacattgttctgtgcagcgctggccgtgacggcttttagcgcatgttcggacgatgacgaagagggcggttattcgggcatgcccgaaattaccgtgaacggcggcgagtcggtgactgtcgccgggaaactcgagggcggcaagctcgaacagacggtcgaggtcgtttcgaaaggcgactggaccctgacattcaagaaccccggggattcgcagtgggttactcccagcgcgatgtcgggcaagaccggtacgacgcagcttaccttcacgctgggtcaggcttcgggagagcgcagcgcaatccttgttctgaccgccagctccaaggtcgagggcttcccgcttacggacgaggctacgatcacggtcgtacagagcgacagcgatgttccgacgggtaacgctctttacagcgagaactgcggcacgaaggtcgataaagtcgatggctactggccttatgtggacaagttcgaaggttggacccgcggcggttcgctcgatcagaaggccgttacttataccggcaacagcgcttcggtagccaacagcggcaaggttttcgatcctgccgaggatgaaacgacggtagttacgggtcctccctatgtttcgatgaacaaatcgacttcggttttcaacatcaatgacatcaatatcgcatcgaacaccaatttcaccttcacgtttactgccgctcaacagattaactattccaatggcgtagtgctgggcgacatgacggatgaaacgattcggttctcggtgtctaccgatggttcgagctatgctcccgttgctctgaaagtcaaaaaagtcgcttccggctactggtatctctgcaccgccgaattcaaactgcctgccggtgtttcgaccgataagatctgggttcgtttcgacggctatgcaggacttgaaaaccacggtctgcgtatcgacgacttcaaactttatgaaggcggcaacggttcggaactcgtcgttccttcggtggattatacgaagggtacggttgccgaggctatcgcagccggagccggcaagaactacgaggtcgccgctacggtcgtagccatgcacacgcagggtatcctgatcggcgatgcgtcgggtgtcatgctggcgttccttggcgaggctcctgcggtagctgttaacgatgccgttaccgttaagggaacgaccgaattgcggaatggcgtcattcagttcggcaaggagggtctttcggtcgccaagaccggcacgggcagctataacacgcctgctcccgaggtgatggacggcacggctgtcacggcctatatcgcaacggccttggaaaataaggctgtgtacaagtatgtgaaatacaacggtgagtttactgtcagcggcaactattacaatgtcgttatcgccggtacgaccacgaaaggctctgttgcctatggcaaatcggagtgggcgtcgtttaatgacaaaccggtgactgtcgaaggctggctgctcggcggtacggccaactatctccagacgatggctacgtcggtgacggtcgattcttcgacgccgattgttgaaatctccgctccccagcagttcgctgcaacctctcccgtggctcaaacgctcaactatacggttaccaacacgacggcttcggctgtaacgttcgcaatcgagggtacgaatgccgacaagttctcgctcggcgccaagactgataacaccatcgtcgtaagcgcgaaaggcgacaacacggataagacagcctatacggccaatctggttgccaaagttgccggtgcgacggttgcaacggttgctctgaagcaggctgcgcctacgagcggttctggctatgcgaagattgaaaagattgccgatctgaaagaaggaacgggctatctggcaggccttgttaatggtaaatatcagacttggacaggagtacttaccaataagcagtgtgagacagttccttattcatataccgaggcaacgggtgcatttgttgctgatgatgccgcaggtgcagagatttcacttgtagctgtaagcggtgtttctaatgcttattatattaagtatggtgaaaaatatctgacagttggtgctgccggtaagaatcaacttgtattggctgattctgcgggcgataactattggacgtttactgatgacactgatggtgttaaggcaaccgcaaaagcatttgcatctattatgatgacatcgactggagctgcgtcgaaatatattcggtcgtatgtgacgacgaatacgtctggtgttgccggtgttgtattcttcctggcaaaataacaacagtcgaggaaaccgacttgtaaaaccaaccactcttggcggggataacaccccgtcaagagtttggtttctaaatgggtctgcggaccaaatgttatactttattctgaatgatgttgaaaattaaacagataggcatgctgctcgtgacgatgtcggcgatgcttgtcctgtttgcgggatgcggcgacaaggacgacgggggcgacaaggagtccctcgcgacgctcgttgcagagaccgtgagcagttcaaccacaacgaacaagatttcgacccaaggcccgtcgggcatcaccttcgaggcgacgatcgtctcgcagggcggggatgcggagtggtgttcgttcgatttgaataagcaggtatcctccgccggcggaaacgtcggggacccggcctacctctatttggacaaaaacaattccgacgacgaccgcacggcgcggatcgacgtaacctataccaacggttattccacctccctgacgctgacgcagagggccgcgggctttatcgactacgaccgttcgtggggcgaacagcccgaatatcgttccgacgacgcttatatctataagacctattatgcgacgtttgtgagcaatcagttctttccgggcggaaaactgcgcaactattcggtatgctacgatgtcgaccggcatatttcgcattgggtggcttatccgatcttcaagaaggtctacgaaacgcccgttttgagacgggtcaacgatttcaattacgatcccaatgaccagctgcccgtgattcccacccgcgaccagcaatacatcgggacaggcggcaacggccgcggttacggtgcatggggttacgaccgcgggcacatgcttccgcaggcttcgcgttacaacaattacgagccgaaccggatgacttactacggcaccaacatgatgccccagaacagcacgctgaatcagaatatctgggcctcgctggagggcaaagtccgtggctggggaggcttgcagacctacgatacgctctatgtggtgacgggagccgctttcaagagcacgaagaccatcgacaatgccaacggaccgatcgccgtgccgtcgcattgctggaaagtgctgctgcgtcagcggggcaaccagaaccggcagatctctcaattcaaggcggatgaactgaaagccatcggcttcgtgttcaccaacgatgacgccggagccgccacgtcgatcgaatcggctgtccgttcggtgaaggagatcgaggagctgacgggcttcaagttcttccgcaacctcgacccggccgtggccgatgcggtgaaaagccagaagaacctcgccgactggtagggattatgatacaatgaattgaaccttaacaacaaaaatcgtttatgaagagaatctttttgacaggactgtttgcctcgctgatcgcggtggcatgcttcgcgcagaagccctacaaagtggtcttctacaacttcgagaacctgttcgacaccattcacgatcccggcgtcctcgatgaggagttcacgcccgaaggacccaagaagtggaactcggccaagtacaccaggaaaatcgggaacctcgaacgggtgttgttcgacatcgccgccgaggataaggattatcccgtggtgatcggcgtttcggagatcgagaaccgctcggtgatggaggatgtgatcgcgcagccgaaactcgcgcccggcaactaccgcatcgtgcattacgattcgcccgacgcacgcggcgtcgacgtggcgttctactaccgtcccgacgttttcaagctggagggaagcgccgccattccgttcaagatgccggaactgcccaacttcaggacgcgtgatttcgtcacgatgtggggcacgatcgacagcgagccgttcttcttcctcgtgagccactggccttcgcgtctgggcggcaaggaggcttcggcccccaagcgtctggctgccgccaagcaggtgaagcacatcgtcgactcggtgaccgccgccaacccggccacgaaggtggtcgtcatgggcgacctgaacgacgatgccacggatgacagcatcgtcgaggggttgcgcgccaagggcaagatcaaggaggtcggcaagggcgacatgttcaatcccttcatcggcctgctgaaagcgggttacggcacgctggcttaccgcgacgagtggaacctgttcgacaacatcatcgtttcggagaacctcgccaccggttccacgggcagcctgaaaatccagcccgccggcaactcgaagttctacggcggcatcttccgccgtccctacatgatccagaaggagggccagtacaagggctatccgctgcgtacgttcgtgggcaacgatttccagggcggtttcagcgaccacttccccgtatatatctacatcgccaaataaacactctaaaatatttgtatgaaactcaaagttctacttattctgatgctcgccgccgtgaccttcacgtcctatgcgcaggacggaggcatccgcggtaaggtggtttcgcgcaacggtcgcgtggtcttgagcaatgtacaggtgaagatcgaatcgctgggtctgacggccatgaccgacaaggacggcaacttcatcttcgagaatcttcctgcgggcagctacacggtgctcttctctacgcccgacttcgaggacctcaacctgatggtccgcgtaggcgataagcatgtgcaggacctcaagtcggtgatcatcgtgccgtcggggcagagtgcggttctggacgacgccgttttcgccgaattcgacagcgactcctcgtcgtcggacacgcaggcgctgccttcgtcgctctcttcgtcgaaggacctcttcaacaacatcgcatcgtaccgtttcagcgagatgcgtttcaacgtccgcggctacgattcgcagtactcggacatctacctgaacggcatccgcttcaacgacgccatgacgggctacggtccctggtcgctgtggagcggactgaacgacgcgacgcgtaaccaggagaactacacgggcctcgaagcgtcggatttcggcatcggcggcatcggcggcatgaccaacgtcaacgcccgcgcctcgcagatgcgcaagggattccgcgtgagcgtgtcgaacggcaaccagatgtaccgtttccgtgcgatggtttcctacggctcgggacagttggacaacggctggtcgtacgccttctcggtgggaacccgccagggcggcaacggctatgtggacggcgtttactacaactcctattcctatttcgcttcggccgagaagcttttcggacagaaccaccgccttgcgttgacgctgctggcttcgccttcggagcgcggcgcgcagcaggcttcgaccgacgaggcttacgctctgttcggcaacaactactacaaccccaatgtgggttaccaggccggcaagctccgcaactcgcgcgtgcgcaacacccacgagccgatcgtgatgctcaactatacgtgggacatgtcggagaacacgcgcctgaacgccgccacgtcgctgcgtttcggcaggaacggctattcggccctgacgtggaacgccggagcggacccccgcggcgactactaccgctatatgccgaattcggataagacgcagatcgtgccgggcataactaccgacgagacgatctatttttacgcgatggatggcgccatagcgaaaggtgtgtgggacggtatgctcgactacgacaaattcttccagacgaatatgcggaatatcgacaccgatccggtgctgtccaaactgatgggcaataacagtcgttcgaactacatgatcgaggagcgtcacaccgaccagctggactacaacctggcggtcaacgtgcagcataacatgcgccacaacatgcgcatcgtcggcggcgccaacctgcgcgtcaaccgcacgaattactactcggagatcaaggacctgctgggcggcgactattggtatgacatcgacaagttcgccgagcgcgacatggccagcgccgaggcttaccagaacgacctggattactactgggctacggggcacgcccgcattgcccgtgtcggcgacaagtacggttactactaccgggcgcacctgctcgaaaccaatgcctgggccaactacacgtggggcatcggcggtttctcgctgggcgtctccggatcggtcggctactcgaacatgtaccgcgagggcatgtggcgcaagggattgttccccaacgattcgaaaggcgattcgaagaaactcgactacctgacctacgatgcgaaacttgcgctgggctacaagttctctggagcgcattcgatcgaggccaatgtggcttacatgcagcaggcgcccaagttcgcgacggcattcgtgtcgccccgtacgcgcaacacgaccacgccggggctgaaggccgagaagattttcgcagccgatcttacctataacctcaacctgccctacatcaaggcgcgtctttcgggatactatacgacgatcgaggaccagtcgaaggtcatctcgttctacgacgatacccgcagttcgttcaccaacttcgccatgagcggtatcgacaaacgctactacggcgttgagttgggcctttcggttcccgtatggaacggcctctcggtcgtgggtgccttgagctggggcgactatacctatacgtcgaatcccaacttcgtgcagacggttgacaacgtggacaagatcgtactgaaagataaggtcaactgggacggttatcatgtggaaagctcgccgcaactggctttcaacatcggtctcgactaccgcggaccgcgcaactggttcgccggtgtgaacttcaactactacgacaacatctatctttcgatgaacccgatgtaccgtacggctaccgccattaagtattatacaaatgtgctgacttccaatacggccaccaatgcgcagaaggcatcggccctctcgtcgatcaagaccctccgcaagcaggagaagtttgacagcgcatatacgttgagcgccaatatcggcaagaactggtatatccaccgggtctacatgctgggcttcagcctcgaggtgaagaacatcctcaacgatcaggacatccgcacgggcggttacgagcagatgcgtatgagcaaggtccgcggcgagggcggcgagcagatttacggccgcttcccctcgaagtatttctacctgttcggtacgacctattacctgaatgtctatttccgtttctaatcgcgcaaagcataatttatgaaaagtcttaaaatagcattggcggctctcgtcggtctggtggccgtgagctgctacaacgatttcgacactccggctccgcagaagctctatacggccgacgatatggccgcaatggggcttactcggatcaccattgccgaagtgaaggaaaaatttggtccgatctccaatacgggaaccaacgacaatttctccacgaccaagaccctcaagttcggaacccgcacgtccgaggaggccaagttcgacggcctcatggagtggcccgaggcttcgaaatactacatcaagggcaaggtgatcagcagcgaccgtcagggcaacatctacaagtcgctctatatctacgacggcacggccggtatcgagctgaagctctacaacggcctttatctcgacttcctgctcgacctggcttcgaagccgatcaagagccagtgggtctacgtgcgtctcgacggtctctatctgggtaactaccgcatgatgctttcgatcggaggcgctccctcggacggcatcaacacggccggcaaccacaagttctacgccaactcgaacctcgacaacccgaaggtcgccgccctgaacgtcttccgcggcgaatacacgacgctcgacgactcggacatcaaggaggtcgacggttcgaactacacgtcgctcggcgaggccgatctgggccggctggtgcgtttcaacaagatcaagatccgctatgcgggtgtgaagaatcaggacggcgtgacgcctccgaacctcaaaaacggcggaaatgcgaatccctatccgagctggatcgtgaccgactggggaacgcccatcttcggcgcgtggtatcgctgggcctacaacaacagcgagcagaatatccgtctctacggttcggtgctgatgagctacaacgatgcggcggagtacacttcggacccgggcgtttacggcatccgtacgagcggttacagccagttcgccatgaagcccatcccgaaggacggcacggagggtacggtgctgggcatctacggcatctatgcgaagaagagcgatttcacgggaggttcggaggactgggcgcagtaccagatctcggtgagccgtatcgaggacctcggcttcccgcccgagtcgctgctttccgaggagtggatcagggccaatacgcccgcctcgtcgctgacgcctcccgtgaagaacggcggcgatgattacgagggtgactgatcccgcgtttgagcaataaaaaactgcgacccttttgggtcgcagtttttttgtgccgcggcggcagcgctaccgcttgttccatttgcaggaggtctggtagtagccgatcgcgcggtcgacctgcatggcgtccttccgctccatcgtttcgaggtggtggggattctcctcggtgggaaccacgcggtactgctcgaagcggcgcacgggcgacagaatcgtgaaggtgtcgccttcgaggtagccgaggtcctgataggtggcgatgaacgcgcggttgacatatgccgggtcgaagatgctgcggccgtagaaatgcgagtcgtagctcatgttgagcagcgacagcagggtgggcatcaggtcgatctgcgagacgatgccgtcgaccactccgggttcgataagcccgggggcgaggatcagcgccgggatgtggtatttctgcaacggaatctcggtgcggcctgcgctcgaagcgcagtgatcggccgtgacgaggaagatcgtgttttcgaaccacggctgcctggccgcttcggcgaagaaccgtcccagcgaatagtcgctgtaaagcacgcctccggcgcggctcttcgagtcgttgggaatgcggattcgtccggcggggtaggtgaaggggcggtggttgctgacggtcatcacgtgggcgaagaacggcttgccgctgcgggtctcctcgttgagcgtgcggatgaccttccggtaggcgtcttcgtcgcagacgccccagatgttggcgaaggtgatctcttcgggcttgtagcttttctggtcgacgatgtcgtatccgttgcccgagaagaaggtctccatgttgtcgaaatagctgttgccgccgtagaaataggtcacgttgtaacccttgtcgcgcagcaaggctcctgtggagtgcattccggcgttgttcggacgcttgatgatgctctggcccgggcagggcggcagcgagagcgtcacggcctccaggccgcgcaccgtgcggttgcccgtggcgtatacgcggtcgaacgccagtcccagtttgtagagcgagtcgagtgcgggcgtgatccgttccgtgttgccgaaccgctccatgtacgaggcgctcatgctctccatggtgatcagcacgatgttgcggcggatctcctccccttcggcgcgcacggcgtgcaggttgtcgcccgtgctttggtagaccccgtgcacgaaggcttcggcctcggcttcgggacgcgtgaggtagaactgttcgtagtcgagcgtgttcttgacgaaggcgtcgtagaacttgtagagtccgttggcctgcaattcgttgacgtagacgttgtcgctgtcctggaagcgggtgttgaagttcagcagcccgatcgcggcgaacagcgccgcgacgtaggccggtccgattacggctttccacctccagcctttcaggcattcggtctgcacgagttcgctgcggaagaagtaccacgtcacgagcagcgtcacgacgacgatgcccagcgtcatcggaatgacggggtaggactccatgatgttgcccaccacctcgttggtgtagaccaggtaatcgacggcgatgaagttgtagcggacgccgaattcgctccagaagaaatattcgctgatgccgttgaagatgatggcgcccacgtagacgacgatgaagagggcgaaccacaccgtggtccagtggctgcggaatccgggcaggaagagccgcagtgcgaagctgccggcccagtagcccagcacatagagggcgattcgcggcgcgacgcttccgtattcgtcgaagatcgtgttgaagaacgccacgtagcagaacgccgccacgagcagggcgaggaggatgtagccccacggctttctgtacttggtgcgcgaaacgctcaacatgaagagccagaggaaaatgaatcccgccgtcgcggcgcagaaatcgttcacggcgcccagcaggaagacttcgcaccattcgccgaatgagaaggcgagtgaggtggtctgctcgttgaaaagcagtacgacgcgcagcacgaggccgacggcgacggtcagcagcgacagtttgagatagaggccggagaccagccgaatacttttttgcatgatgaatttgggaattaacggtacaaagttaaccattttcagcccgttcggaaaaagaaaaggcagtcaaccgggtgactgccttgttctgttgttttgaaaaatcgtttgttttggtgcttacttcgacgggcgcatgacgaccttcacgaggtttccgtccgcaaggatcttcttggcgagcgcctgcacgtcggcgttggtcaggtcgcggatcgcctgttcgtggtcggcgatgtagttcaggcccgagccgtatttgatctggatgtagttcatccatgcgccgttctgttcgaggctgttcttccagctcttgagcatgaattcgcggtgtttctcgatgtcctcgctcttgggaccgttggctgcgatctcctcgatctccttcatcacgatctcgcgcagttcgtcggccatctcctcgttggtgtcgaacgaaatggtcatgctgtaagtctcgcgggggatgtacttcgtcgaaccctggacgcgcacgccgtaggttccgcccttctcctcgcggatcgaaacgagatagcgcgaattgagcgcctgcgtcaggaacgtcagggccattttgtttttgagcgtgtagggcatctcacccgagaaatggtagttgaccgagaccttcggctgctgcatcggagccgtgaactcctccgtaacctcgcctttcaccggataggccttgtcgtcgacgtaattgatcggtttgcgggcggcggggatcgaaccgatgtatttctccacgaggggtttcagcgtttcggggtcgatgttgcccacgaacgtgaagacgaatccgttggctccggggtagagcttggcgtaaatgccgggcagctgttcgaagtcgaacttgttgacgatctccgtcgagatcatctgacggcggggattgtggccgtaggtcacgtcggccaccttctcctgcatcaggaagtcgggattcgacttggcattggcgagctgggcgaggagcatcttcgtgagattgtccacgtcgtccttgttgaaccggggctgcgtgaaattgaggtagagcagctggagcatcgtctcgatgtccttgggcgagcagacgccgcccatggcgctggtgtagttctccaccgagggctgcaccgaggccgttttgcccgaaagctgtttcttgagttccgtggccgagaatttgccgacacccgacatcgagttcacggcgggcatcatttcgcccatgtagtactcctcgtccgagagcagcgacaggccgcccttgccgactacgcccaggcgcacttcgtcggccttgaaggtcgtgggtttcacgacgaccttcgcaccgttggccagcgtccattccgtcgttccgagctgtttgtcctcgaccgtcttcttcacgggcgagcctttgagcacggtcccttctgcgatcagcggctccttgaccacgttgtcctcataggccgtgacctccgatgcggccaccttgtcgcggatggcgagaatctcctcggcggtgggcgttgcgacgccctccttctcgggagcgttgatcacgatcacctgattcgtcgggagaatggtctgcttcgcgaaggcgttgacggcatccacgttgagcatcttgatcagcatgctgtcgagctgccattcggtctcggcatcgggcatcggctggtttttctggtagttgttcagataggtctgcacgaattcgttgttgcggcggtcgttgcggttggcgtacgagcgttcggcctgacgcatcaggttctcctgggcgcgttcgaactcgccctgcgtgaatccgtagcggcgcaccttctccatttcggtatagagggtctcgaagccgcgggccagcttgccgtcctcggtcatggccacgaataccgtggcgtcgagcgtcgggatgatgccgatcacgtcgcccgtgcccatgccggcgccgaggaacggcgcgtcgggctgcatggcgatctcctgcaggcgggcgttctccatcgtggtcatgtaggcctcgatcacgttgttggcctcggccagcaccgtgttggcgagctgttcgggaagcgccgggcgcttgatgaagagctgcaccttcgtaccctgcatttcgggatcggtgtagatgctgacgatcggctcctcgttgtcgggaacctcgatggtctccttctgcgatgcgccggcggcgggagccggaatgtcggccatcagcgtcttgatcttggactcaatggcgtctacgtcgatgtcaccgaccacgattacggcctggtagtccggacggtaccattgtttgtagaaatcctccagctccttgtgccggaagttcttcagcccgtcgaggtagccgatcaggttgcggcgctcgtatttcgtgcctttgcccagcgcctgcaacagcttcatcgtcgaacgccacgacgcgccgtcgcgcgtgcgcagctcctccatgatcacgccgcgctccgagtcgatttccgacggctccagcgcgatgaagtgcgaccagtcgtgcaggatcagcagcgccgagtcgatgattccttcgcgcgaggtcggcacgtccttcatgttgtagcacgtgtaatcccagctcgtgccggcattgaggttggcgccgaatttcacgcccacggtctccagatactccgtgagctgtttgcccgggaggttcttggttccgttgaaggccatgtgttccaggaagtgggcgaggccctgctgcgaatcgttctcctggatggctcccacatcgtggaggatgtagaaatcagcctggcctttcggcttttcgttgtggcggatgtagtaggtcattccgttttccagtttcccggtgcggacctccggatcggccgggatcggctggttcatctgtgccgcggcgctgccggcggcgaacgccgcgacggccagcatcaataattttttcatgggcatttgtggtataaggtttattgtttctgtgtctcttcggggcggtattcgatgatatcacccggctggcagtccagctcgcggcagatcgcttcgagcgtggaaaaccggatggccttggccttcccgttcttgaggatcgagaggttggcgggcgtgatgtcgacccgttcggccagttcgccgagcgacatcttgcgtttggccatcattacgtctatgtttatgattatcgccataaagtcgtcccccccccttttatcgtttgcatttctctcatgtcgtctgttttagatggtcagtttctgctcctcgctcaaattctggccgatggcgaagacctcggcggcgaaaaggatcaggatacccatgatgatcattgcgtaggagacgtggaaacccgcgtcgacggtgtatccgcttccggcgagcagttcggcggcgcggctgttcatcacccagtccacggtgtcgctgatcagttcggtgacgatcgtcagcatgccgattgcgcgcagataccagacgttgcgtttgtcgagcgtgcgctcttcgcggatcgagcggcgcagcgagtggatgatcacgaacatcagtacgatgatggccagatagagaagcgggcagagcaggaccagcgcatagagccatgcgctgccgccgatcgaacggaatgccagccccagcggggatgtgcccggggcgttctgctcgacgaccagggcgagtttgcggacgttggctttgatttccacgcccggcgccgcggcgatttcgacggccgtttcgggctgtcccgtcacccggatgtcgcccagcatgtagatcatgcgcggcacgccggatttccacttttcggcgatgtcgttaccgagttccgcgccttccgccgcgccccgcgagaaattgggcaggattccgtgggcgatgcttgccacgagtacgatgaaaaacgtaatgtaaatgaccagcaggcgttgcaggagcgattttttgttctgcatgtgtgactattttggttttacagttgcaaagatagaattaattttcgaaaaacaaataatatttatcgtttttcgataaaatttttcgcggcggacaaaaaaggacggcacaggcggccgtccttcggatcgtctccggaacgtttactccacgttgtctttcagctgtttccagaatgaagcgctgatggacatcgagatcgagatggccagcacgtagaggatgaacatgacgacgaacgtgatgaagccgatgccgatcgcattgcagatggcctggaaaatgccgaatacgatgccgaacagcacgccgacgaccagcgacacgaagaacatggtccatttgctgccgtaggtggcgtcgttcgaagccttgatggcctgtatcggatttttgcccttttcgatgaggaaatagtaggagagcgtccatgcgatcgagagcacgatgcccgggatgaccatgaagagcacgccgatgaaaatcgggaaaaccatcaggcccatcgtgatgaagaactcgcccatgtagcggcggtatttgctgtcgaaaatgcccaggggattgacaatctcacccttggccaactgtgtgggcagtaaggtgatggcgattgtggtccccacattgagataaggtatccagatcgtaatgagccataaggccactgctgcgatcaccgaaggtgcgttctttacgccgatggcgacggaatccttgagggtttctccgaaatcgagttttttcacttccataactaacaggtttaagggttaacatcaaaaacaaaaatacgaaaaaaatcgtatctttgcctgcataaccgtaaaattcaatgcaatggctgaaaaatctcgctataattaccgggttgaaccgcaggacgtggatttcacgctgcgggcgacaatcccttcgctgggcggctcgatactcaacaccgcgggcatcgacgcccacggcaaggggttcggagtcgatgcgctgaatgccgacaaccattcgtgggtgctttcgcgcatggccgtcgaattcgactgccagcccacgcagtacaccgactacaccgtggctacgtggatcagcgattacggccgggtgctctcgacgcgaaacttcacgctgaccgatgccgcaggccgcgaattcggccgcgccgtgacgcagtgggcgatgatcgacctgcagagccgttcggcgatcgacctctcgtgggtgggcgacgcgcatgccgacgccatcgtcgatgccgcgcccccgacggacaagccgcgcaagatccgtgcggtaagccctaccgcgacggccgaacaccgcgtggtttacagcgacatcgacttcaaccgccacgtcaacacgatgcgctatatcgaaatgatgctcgacatgctgcccgtcgacatgctgacgcaggaggctccggtgcggctggacattcatttcctgaaagagtgccgtttcgggcagacgctgacggtggggtgcgagttgcgcgggcgttcggcgctgttcgaaatttcggccgacggcgctgcggctgccgtgcgtgcctctatcgaatggaaataggcctgcggggaacgcttcgcagggcgcttgtggaacgggttttgcagtttacggctgcaaaaccttttttcattatggagagcgcaaccaaaacacaagcgaaaaacaagtatcaggtaagcatcgacctgctgaacgatgccgtgggcaaggagatcgccacttcgttgcagtacatgtatttccacactcatttcgaggacgaccgctaccagtatctctcgaagatcatgcgcgagatttcgatcgccgagatgcgtcacatcgaggagttctccgaccgcatcctgttcctgcagggcgacgtggacatgaacgcctcgttccgcacccggcaggtcaccgacgtgaaggagatgctgcgcatggccatgcagctggagcagagtacgatcgacagctacaacgaagcctcgcgcatcgcctcggagaacaaggacgccgtaacgcacaagatgtttcaggacatcatcggcgaggaggagcagcatctcgacaccttccgcaccgagttgcagaacctgatcgactacggcgaggagtacctcgcgctgcaatcggccgccggcagcaagcatacgtcgaagagtttcaaccattccggcggcggcgaatagcggttcgcgcggcggaaagcacttctgacgcaaaaaacggaatccttttgccggggtcccgttttttcggttatctttgtacctgaatcattcgcgggaacctgtgcaaaccccggccggcgcatgagttcctcccgggggagggattcggggcggggcgggcttgccgacgcggccggaggccgcaggcgtcgggttgccggatcggatgaacggcatgaaatcgccggaatgctctgatacgatgaaaataacgattttaggacctgcccatccctaccgcggggggctggcctcgatcatggagatcatggcccgcacgttccagcggcggggcgacgaggtcgacatcaagaccttcacgctgcaatatccctcgctgctgtttcccggcgagagccagacggttgcgacgcctccgcctgcggacctccgcatctgccgctgcgtcaatacgatgaacccgctgaactgggtgcgcgtcggccgccggatacgccgcgagcgtcccgatttcgtgctgatgaagtactggacgcccttcatggccccctgtttcgggaccattgcccgcatcgcccgcggcaacggccatacgaaggtgctgtgccagatcgacaacgtcgagccgcacgaacgtcacctgaccgacaaacccttcaaccgctactacctgcattcggtggacggcttcgtctacatgtccgagcaggtgcacagcaagcttcgcgcgtacagcgacgctccggccctgttttcgccgcacccgctgttcgagaacttcggcgagcgggtcgaacgctccgaggcgtgcgtgcgtctggggctggaccctgcgaaccgctacgtgcttttcttcgggctgatccgcgattacaaggggcttgacctgctgctcgacgcctgggcgcagctccggcgcgcgggccgcaccgagggccgccggctgatcgtggcgggggagttctacaccgcccgggagccgtatctgaaccggatcgccgacaacggattgcaggacgaggtgctgctccacgaccgcttcatccccgacgacgacgtgaaatattacttttcggcggccgatttcgtcgtacagccctacaagaccgccacgcagagcggcgtgacgcagatagcctaccagttctgcgtgccgatggtcgtcacgaaagtcgggggactggccgagatcgtgcccgacggccgggtggggtatgtctgcgaacccacgcccgaaggggttgccggcgccatcgaacggatgtacgaaggggacacgcttcaacgcttccgggaaaactgcgtcgaggaacgccgccgcttttcgtgggaggagatgtgcagccgcatcacggagctgtacgggctggtggcttccggaaaatagggggcgccgcagcttccgggagaactgttttttcggcatttcgtttgttattcaggcgaaaagacctatctttgcgggacctaactcatactcttgcatattgtggcgtcacaattcatcaatctgaaatccaggttgcttaacccgtatgtggtatttgccgtctggatgctctgcacggtttggatctgcatcacgcagtcgctggccgggcctcagaactacaacaatttcctggtcttccgcggggtgttcgaccatctgttctcctcgcttcccctttacgagccctatccgctcgaatacggggatatcaaccattacggtccgattttcgcctttatcatcgcacctttcgcggtgctgccgccgtggctgggcatgtcgctgtggtgcatgagcctttcgctgctgctctactggaccgtccggcagctgccgatgcccgtggtgctgacgagcctggtgctgtggctgacgctcaacgacttttacggagcctgcttcaaacagcagttcaacatcgccgtcgcggcgctggtcgtcggggcgctggccatgatcgagaaacgccgcgaaggatgggccgcactgttcatcgtcatcggtacgttcgtcaagatttacggcatcgtcgggctggcctttttcttcttcgtgcggcgcaaaggacgtttcatcgggtatatggctttgtggagcgccatggccctgctgctgcccctgctcttcgtcagtcccgaatacctctggtcgcagtatgcggcatgggccgccgacattgtgcagaagaacggtgagaacatgttctgtgcctatacgaacatctcgctggtgggctgtgtgcgcaagatcagcggttcgccggcctattccgacctgctgatcatcgtccccgccatggtgctgtttctgctctcctacctgcgcaccgggcagtacaaacacttcagctaccgcctgacgatgctggcttcactcctgttgttcatcgtgctgttcagcagcggcagcgaacacagcggctatgtgatagccgcgctcggcatgggtatctggtgggtgaattttccccccccccgcacgcggccggctcgaatggacgctgctcctactggccctgttcgccagtttctcctataacttactcccgactaagttctaccgtggcgtattcgtagcctacgcgctgcgttcgctgccgttcttcgccatctggctccactgcatccggaggctgtggcgcgaggatttcgccgtcacggacgtccttctggactacaaaaccctgcctgcggcagacgaggcggcaaacgaggcggcagaatcccgtcccgcgcggccgggcgacgggctcgacatcgtatgcccgtgttacaatccggctccggggttcgtccctgcgctggcccgctcctatgcggagctttgcgcccggtatccggacaagcgcctgcacctgatcgtcgtcaacgacggttcgccgcatggtttcggcgaggaacagcacggggcgctgcggcaggccgttccggatgtcgagatcgtcgatattccgcacggcggcaagggcgctgccatccgggccggcatcgcccgttcccgggccccgtataccatctatacggacatcgacatgccctatacggcggagtcgatgtgcgaggtgatcgaccgggtgttcgcagggaccgacgtggtgatcgccgtgcgcaaccggagttaccattcgcggctttcgcccatgcgcaagatgatgtcctacgggtcgaaactgcttaaccgcatcttcctcaacatccgccataccgacacgcagggcggtctgaagggcctctcgccccgcgctcgggcggtgatgctgcgcacacgcatctccgatttcctgttcgacaccgaattcgtcgtcctcgccgcacgcgacaaacgcctgcgcatcgaggaggtcgagaccatgctccgcgacggcatcgtcatgtcggcgatgtctccgcgggtgttgttccgtgaattgagaaactttttccgtatcgccatccgcctatgactgtgacactcggtttcgacgtcgaggagttcgattttccgctcgaaaggggccgcggaatcgatttcggcacccagcttgcggtcagctccgaggggctggagttcctgctggacctgctcgcgcggctggagctgcgggccacgttttacacgacggccaattttgccctccaccgcacggaccttgtccgccgcatcgtcgccggaggccacgaggtggcttcgcatgactattaccacgggctgaccgccgggtcggaccctgccggcagccggcggacgctcgaagagctgaccggacagcgcattgtcggctaccgtgccccgcggctggccgccgcttcgtccgcggcgctcgcggcggcggggtacaggtacaattcgtcgatcaatccgacgtggattccgacgcgctacaacaacctccgggccccgtgctccgtgtcgcgggaggaggggctcacgatctatccggtttcggtctccgcgcctttccgcgtgccgctgttttggatttcgctccacgtcatgccgctgccgctctacaaactgctgtgccgcagcgccctgcgccgcgacgggcacctgaacctctatttccatccgtgggagttttccgcacggctgcgcgagccggctttcggtgttccgggctatcttacgcattgttcggggacggacctgcaacggaaattcatccggctgctggagtggctgaaagcccgcggctgtcggtttttgaccacccgcgaatacctcggatgcgatgagtagggtagcgatgatgctccggaggctctatgagagtccgttcgtgcgcttcgccgtggtgggaggcgtcgccacggcggtcaattacgccgtttacgtcgtgctggtgcggtgtttcgacgacctctggccggcccttgcctatttttgcgccttctgcgtcagcatcgtctgcaactttctgctgtcgagctatttcacctttcgggtacggccctctgcccgccgtgccgtgcggttcctgacggcccacctcatcaaccttgtgaacgaactcgtactgctcgaaatctggctgtgggcgggcgttccgaaactctatgcgccgctgtgcgtttttctggtcgcctttccggtcaatttcctgatggtgcgcttcgccctgcgcgggcgtttgaaatcctgaaaaaacggaccctgccgtgcgatgcgcggcagggtctccttcttcatttattcgggtgtagcttgggctacttcttgatattgggcagttccagcccgtatttctttttccggtcttccgctttgagccacagtcccagcagcatcgccagcacgccgcatgcgacgaaaatcagcatcggacgggtgtagtcgtagggcattccctcggtccgtccggcgttgaaatatttgagtgcgaagccgaagagcatcgggaaaaggcacagtccgatgttctgaatccagaatatcagcgaataggcggaacccagatagcgcgtctccacgatcttcggaaccgagggccagagtgcggccggaaccagcgagaacgagatgccgagcaggacgatcgagccgtaggcgacgggcttgctcgggaactccgggagcacgaaggcgaaggtcaggtggcagacgatcatcagaatggcgcctaaaatgagcatcgtggcgcccttgcccttgtggtcgaggtatcggcccaggaagggggtgatggccgccgcgcccatcgggaaccagcggaaaatgtcggctgcggtctgggccgatacgccgaggttgctctccagcatgttggtggcgaagcgctggaaggggaagatggccgaatagtagagcacgcagaggaacgcgatgatccagaacaccttgctgctcaagatgtacttcaggtcgctgaccttgaactcctcctcgctgccgcctccgccccggctgtcgagacccagttgtttgtccagtttgcggtccatgaaggagaagatcacgaacgtcagcaggccgatcagcagcagcacggtgcagaatgccaccggtcgtacgaccgttgcgggagccatgtcggcgagccacggcgaaatggagaagatggcgaaaacgccgacgcgggcaatggccatctcaagtcccatggccagagccatctccttgccttcgaaccacttggctatggcttttgatacggtgatgccggccatctccatgccgcagccgaagatcataaagcccagcgacgccagtttggccgaggcggggaacgaggtccaccacgagccgagccacgtttcgatgcccgaacccgctaacgagtcgctcacggcgtagtatttcagacaggcgccgatgaacatcagcgaagccgacagttggccggtgaaccgcacgcccatcttgtcgaggatgatgcctgcgaggatcagaaatccgaagacgttgagtatgaactccgaactgccgtacatgccgaatacgtcgggggtccatccgcgctgtgcctcgatcatgctttgcagcggcgacatcaggtcgacgaacatgtaaccgaaaaacatcgtggacgcgatgagcaacaacgccgtccatcgggctgcggacgagtcgttgagtttacgttggatagtttctgccatatttttttgtgttgagttagttatccagtgatgcgtagcgtttcagcacctcgtaggcttcggtgattcccagttcgccggctttcgagaggtcgaggcagcccttgcgggtgtctttcataaacagctggatgatgccgcggttgtagtaggcctcggcgaatgcggggttgagtgagatggctttggtgtagtcctcgaacgcctcgggcaggctgcccgagagggccagcaggttggcgcggttgtagtaggcgtaggcgaagtcggggaagagcttcacggccttgttcaggtcggccaccgcctcgtcgtagctgtacgtgcgtttcgaattgttgttcagtcggttggcggggtccgagtcgatcgtgatccgctggtaggagttgtcgatcgacgagatgaagtcgatcatctcggcgcgcgtcgtcgagcggttcaggtagaggaacgggttcgacgggttcaactcgatggccgacgaataggtgctcaccgaattggtgtactgcttgatgagcgactgcgtgacggcgcgttcgaagagcacggtccatgcggggttgcttgcgttaagctcctgcacatactgcttgtcgagcatcaccagcgtgtcgggcgcgatgttgctctcgcggcacgagagggtgaggtattcgttgccgatgcgcttcttgaaatcgtcgacgcgttgcaggtgatagggtttggctgcgggaaccgagtcggggcgcatgagcgtgaacttgaacagcggcagcaggcgcatctcctcgtgtccgccgttgtggcccgtgatgcggtcgaagctgcctccggcgaacttgctgtcgaacgacagcaggcggtcgaagcgctgcgtggtgtcggcgtagatcgaataggtgctgtcgttcaggcgcgaacggtattcggcgattttccgctgggcgatcgagcggtcctctttggcgccctgcgggtcgcggagcagttcgcgcagccggccgcggtaaatgtaggcgttggcgaagtcggggtatagcttgatggccgaggtgtagtcctccacggcgcgctcgatctcgcccagctgggcgtagacgcctgcgcggttgtagtagaccagcacgttgttgggcgagtagagcgccactttgtcgtaatcctccagcgcgcggttgtagtcgccgatctgcgtgcgcagcatcgcgcggttgaaataggtcagcgagttggtcgaatcgagctggatcaccttgtcgaaatcggccagcgcctgcatcgggcggttggtggcgttgtagaccagcgcgcggttgaagtaggagagcaggtaggccgaatcgcactcgatggccttgttgaaatccgcctcggcctccttgtactgttcctgctggaggtgcagtccgccgcggcggttgtagccgttgggattctcgcggttggtgcgtatcgcggtgttgaaattctcgtaggcgcgcgtggtgtctttcaggtggaggtagctcaatccccggcagatgaaggcgtcggccaccttgttctcctggcggatgaacttgtcgaaatcgtcgatggcctccttgaactgctggttcagcaggcgcgtcacgccgcggctgtaataggggcccggcaggtcggggcgcagctcgatcgcctcgcggaagtcctgcaaagcgtcgtcgtagttgcccagacgcgagcgcgtgatggcgcggtaggtgtaggcctgcgtgtagacgggattgagccggatggccgtcgagaaatcgtcctcggcgcccagcaggtcgtcgaggttgtatttggcgatgccgcgcaggaagtagccttcgaaagcgtcctcgtcgaagcgcagcagggtgttcagcgtgcggatggcctcctggtagtcgttgttcatcatgcacgaacgtccgacccagaaaaaatattcccggttgtactgtgcgtgggctttcgtgccgcacagcagggcggttcccaatatgattccggcgatgagtttccgcatgctgactgattttgctctttaaacgggctttccgtgcgatttattattcctgttcgtatccgaacctgcgtaattgccgttcgttgttgcgccagtcgtcgctgaccttgacgaacaactggaggaaaaccttcttgccgaggaactgttccatgtcttcgcgcgccgtctgtccgaccctcttcagcttctcgcccttgtggccgatcaggatgcccttctgcgagtcgcgggccacgtagatcgtcgccgcgatgcggtcgatcgtcggctcctccttgtaactttcgatctcgatttcgcagcagtaggggatctccttgtcgtagaatttgaggatcttctcgcggatgatctccgaggcgaagaagcgcagcgtcttgtccgtaagcgtatccttggggtagaacgccgggccttcgggcagcagcgagaggatggtccggaacagcccttcgatgttgaaattctccttggccgacgtggggacgacctgcgccccggggatttcggcctgccatttgtcgaccagcgcttcgagcgcttcgggcgtcgagaggtcgatcttgttgatgaccacgacggtcggaatgccgctccggcggatgctgtcgacgatttcggccgagcgttcgctctgctccacggtgtccgtgacgtagaggatcacgtcggcgtcggtcagggcgcccgtcacgaacttcatcatcgactcctgcaacttgtacgagggcttcaggatgccgggcgtgtcggagtagacgatctggaaatcctcgcccgagacgatgcccatgatgcggtggcgtgtggtctgcgccttggaggtgatgatcgagagtttttcgcccacgagggcgttcatcagcgtcgatttgcccacgttgggattgccgatgatatttacgaagccggaacggtgcattttttttgctttattcgcagacaaaggtagggatttattcgaatttatcctatatttgttttacaatatgctaaaatcgcactgcctatgaaaaaatgagaacttttgattcttaatgccgctacggcggcacacgacatataaaagcgcatcggcttttcttcttacattcagaacttggacacttttgaatcacagagaggaattaaagttgatgctcgcgctgttttacggcgcgggcattcctttcatctttctgtgcaggcagtccaaggccttgaatgtggatgaacagagtttgtccgcgttttttgtgttttgacatttgctcgatgtaaaactctaactccttgaatgatgaaacgttttaatttgcttgtgtatgtttaccggggcataaacacgctggaagaaaaattcacccggaagaaccatcccgattacacatccgatttgagtaagcatgtcctgatcgtgacgggtgtatttatcggagcgacattaattacctcgctgctgggggtgtagttatgagcatgcggcacggaaatttctctcctaatttgtcggtcggcatgggcataggtctgttttttctttcaacgactccgtttctgtgttgtgtcgcctactggatctattatttgaaacggcatttgtatttgttctcgacgaccggtcagaaaatcggatatggactgttcacttgtgtgatgcttgctattctgggaccgtctattttcccgctgcttatagctcttattttgctgtccattgccatttcgatcgctttgttcctgttgagtgtcgtgatgacgatcattgccttgttcgacggaggaggttcgaaaaagaggcggttttcgctcgacaatggcgatgaggtgaccgaaaaatcgggattgttcggcgaaaaatattatgaaggccggagcggaaaatcctatgaaaccaacgataacggcaggacgttctccgaaaagtagcattcctcaccgggtttcacatgactgcaaaaaggctctcgtttccgagagcctttttgcaatgaagtcttgtaaaatgtagcctatcgccgcatcattccgcccggcatcttgggcatcttcatgccgccgccggccacggccttcatcatcttgcgcgtgtcgtcgaactgttgctgcgcgccgcgatgtcggccccttcggctcgcaaccgccggccgtgggcctttatcgtggtggataacaaggccttgctacggcaactggccgactcgctgccttatgcgcagagcgccgctgcggctccgatggctgtcgtggtgtgcggtgcgctgaccgagtcgcagggtgcgaccaatgccgggtggtgggtacaggatgcggcggccgcttcggagaacttgctgctggcggcccatgccgtcgggctggggaggctgtctggacgggcgtgtattcctccgaggatcgcgtgcgtgccgtccgcaacgtgctggggcttccccgccgcgtcgtgccgctcaacgtgataccgatcggttatccagccgaaaatcccgctctcaagcagaagtgggaccctgcaaaggtccgctgcaacggctgggccgagtaaacggaatccctgtgcaaaccgcagggattctttgctattgagcttttatccattcgaaaacggggtcgactccttttttgaaatctgcgaaactcatctcgatcgacatgtcgggttcgatggtctcgatctctttttccgagcgtttgaagtattttgttgaataattgaccaaaaccttcgaactcggaagctgaaagctgcggacctccccgaaatggttgggctttccggccgtctcttctccgacgaaaacggcattggtcagctgtttgaaatccatggcgttcagaatcgccgaggagaatgtatcgcgtcccagcaccacatataccgcaacttgcgggtgttgtttgagggcttgtgcgagtcgttcgacaaattcggttccctgtgatgagttgccgcctccgttgtaacgcatgtcgaaaatgagtttgtccaccggtttatcattcagcgtttcgaatgctttccgggtaaacgcctcgaacgacggcagcttttgcgcagcttccgcgtcgccccgttcagccgccagctcacggctgtgacatttgttgtaaagcatgtaatagatccgatcttcggggaaataacggctggtgaagaggactttgcggttggcggttgcgaaagcgagggagtcgggtctgaaatttacgaatgcattgtcgggatgtatcggctttaccacctgcgtctttccgtccgacagcataagcttgacttgccgggagtcggcaaatccgaagtgttcgagagcttgaaggctcatcaccgtttccgggacgattgacttcacgatcgcctggttgtcgatggtgaaaagagtgctcaaactgtcgatgaccgtcgcgatgggcgtgtcgttgatcgctacaatccgcagtcccaaaatttctttgttttccggggtcgttttcgtaatgtagagcccgtcgctgacccataatgtgccgagcggaagaatctgtgtctggtcaatcaactgaaagaattgcagcatggtgtgtgagtcgccgaagcgggcgatcagctgttgcgttttgagggcgacctgaaaatcagtcagtcgctccgactctgctttaatagcctcgattcccgatacaaactcccctttgctgcgggccgtaaaaaagttgcaatgcttttcgggcagctccttggtcagaaattccagatcggctttccagtcgattttccccgattgtgcaaatgccgcctgcatgcacgtgcagagcaacagcaagaggagtttcttcatggtttatacgttttctttcggtgaaggtgacgatttttctgtgatcttgcgtaatgtgctatttgagacgtccgcatgtaaacaaatcaggcaagccttggagcctgcccgatccttatataatactatcgccgcatcatcccgcccggcatcttgggcatcttcatgccgccgccggccacggccttcatcatcttgcgcgtgtcgtcgaactgcttcatcaggcggttgacgtcggccatcgtcgtacccgaacctttggcgatgcgttcgcgccggcgggcgttgatgatctcgggatgctcgcgctcggcgggggtcatcgacgagatgatcgcctcggtctgcttgaacacatcgtccggaatgtccacgttcttgagcatcttgcccatgccggggagcatcgacgcgaggtccttgaggttgcccatcttcttgatctgctgaatctgcgagatgaagtcgttgaagttgaactggtttttgaccagtttctttttgagcttgcgggcctcctcctcgtcgaattgctcctgcgcgcgttccacgagcgacaccacgtcgcccatgcccaggattcggtcggccatgcgctcggggtggaacacctgcaaggcgtccatcttctcgccgctcgaaatgaacttgaggggcttgttgaccaccgaacggatcgaaatggccgcaccgccgcgggtgtcgccgtcgagcttggtgaggaccacgccgtcgaagtccagccgttcgttgaactcccgggcggtgttcactgcgtcctgacccgtcatggcgtcgacgacgaacagcgtctccgaaggtttcacggcggccttgatggccgtgatctcctgcatcatcgcctcgtccacggccagacggcccgcggtgtcgacgatcaccacgttgtaattcttctgccgggcgtacttgataccgttctcggcgatctcgacaggattcctgttaccctcctcggtgtagacctccacgccgatctgtccgccgagcactttcagctggtcgatggctgcgggacggtaaacgtcgcctgccaccagcagcacctggcggcccttcttcgacttgagcagcgaagccagcttgcccgagaaggtcgtcttacccgaaccttgcagacccgcgatcagaatcaccgcaggcgtgccctccagccggatgtccgtggccgtgccgcccatcagttcggccagctcgtcgcggacgatcttggtcatcatctgtcccggcttgacggctttgagcacgtcctggcccagggctttctgcttcacttcgtcggtaaaggtcttggcgaccttgtagttgacgtcggcgtcgatcagcgcgcggcggatctccttgagcgtctccgcgacgttgatctcggtgatgcgcccctcgcctttgagaattttgaacgaccgttcgagtttatctgttaaattttcaaacatgacttctgaaattatccgagcgcaaagataatcaataattcacaaagcacaatccgccgtggaaattttgttatgccgtgaaaaatagttatgtttacaactgaacctaaccgtcatgcaatgaagaaatttcttttcctgctgcttgccgtcacggccgggaccgctccggcgcaaaccctcgtctatcccggcgagcacgaaatgccacccgtcccgaagaccttcgacaacgaactgggcgtgcgctacggagcgcagctttacgtgggcgacgggcggggacccgaattgcaggccttttcgatcgactatgcccgttataatttttacaatatcggttttcgaacggggctgaacgtcttcgtcgacgaggatgccgagaactatttctccgtgccgctgcaattcacctggcggaccggacgtatcgcctcgtcctggcgccgggagagccgggagcggagtgtgcagaataattactacaacggctcttatgcagatccttacggcgcttattccggcggaggggcggacgtgggcagtacgtttctcaacgtgctgcttgcgatcctgccctcggggttcgaggtccatgcgggctttaccccggggctgatgtgcgggccgttcacgaccgaaggctattcgacgaccgacccttcgtggcggccctataccgtccggcagcgtttctcctgtacgttcgacgcgggtgcgcggctgatcatcccgatctggcggttcaacctcttcggcgacttcacctatcactgctacctgaccgataatttccgggccggggagtttcggccttcgcgctcctatatggggctgggtgtggggctgtcgttcaatttttaggagcgggattccggaacggtccctccgttacccggtccctccgttacccggtccgtccgtcgctaccggagcagtccggcttcgtaataaatcacgatttgctcgatcatccggtcctcgccctccctgtcgtattccgacttgaggttctgaccgaagattttcgagacgccctgccagaatcccgccacgaaaccgccgcggaactccttcaacacctcgtaggcggtgtattcggtttcgcggtcgatgagtttcagcagcacgcggccctgcgtgcgggtcatgtgtttcagcacgggggtgtattcgtccttgatctcgtggtagatttgtttgatatactccttctgggcctttttggtcggcaggcggcacaactcctcctccatcgtcgccatcttggccttggcgatctgcgcgatggggtagacctttttcacggcgtccaccagccggcggtagcggcgcaggtcgaccgggcggctgaagacgtagaccggcaggacgtggaccagcgggatcgaatcgcccttctcgaccgtccactcctgatgccagaagccacggcctccctgcgcctgcgcttgggaaagcgcggcggcgagcagggcgatgaggagtatccactttttcaacggcggcgaattttttgtacctttgcggcggagtccggatgaaaacccgtgcggttttgcatccggtttgccggggtgtctccggcaaagataacgattcaccgcgataaacgaattacgaacagcgaatattatgcttgaaaaaggactttccgcccgcagcgccgcaaccgtcgccgccggcaacacggccgccgcgatgggttcgggcgaccttgcggttttcgccacccccgcgatggtggcgctgatggagaacgccgccatgacggccgttgccggcgaacttcccgaaggcgcgaccaccgtcggcgccgagatgaacgtcacgcacatcaagccgtcgggacttggcgccgaaatcaccgccacggccgtgcttgccgaagtcgaggggcgcaaactgaccttcaacgtcggggcccgcgacgccgaggggctgatcggcgagggcatccatgtccgctacatcgtcgaccgggaaaaattcatggccaaggtgaagtaatggaaaagctccggatcttctgcgtctgcgaaaagacgtacagcttgatttgtagttatttatgccggatcgaaggattgggctctgtgtttggacagggctcgatccttttcgtttgtgtacaattctgttcaagtcgcccgatgcctgtaaatttctgtgcttatactacttaatcttgctgaattattggcggttgaatttgcataattgatttttttcgttatttttgccctacatccattacaactacatattgtaattatccgtaagactctcgcgaacctgccttcaatgtttcatccttaaacttcaaactatgaaaactcgcattttgactttgacagcagccctgcttctactgggtgggtttgtcgcatgcaacgactcggaagaatccgaatatatcggcactcctcccgtcacagcctccgcggacgtatcggcttttttcaagacctatctgccttcgagttccagttcgcatcccgagccggaattcaatttcagcgagatcgatgatcgcgacatcgaatgttttgtgatcaacagcatggaagagttcgaggccgttgcacctccttcggtcgagctgccagtaatcgactttgacaaatatacccttattattggacagcattggatggggcatcccggatactctttcgagaagcaggccgtcgataccgaatccgataagatgacattgaatttggtgtataagcaactgaagggtggtactccggcgattatgactattttttatttctggggactatacgacaaacttcccgaaaaaacgcttactgtcaacaaaatcataatttagatattcttaatatcatgaaaaagctgctttctcttatcattgcagtcataacattttatggttgccagaatgtcattttgtcagaggaatatcaagaaaacgttcccgcgacccgtgcgtctgtgggttcgtctgattattattattggtgtgacggtgtgaaaatcccactaacggtcaacgagaacaagtcgtatgttttggttgaaaccgcaaaaattgaaagtgttcgcaaatcggccgtaaatatccgtgggggaaataccagaactattgataactatgctgcgctgggcataagatcgtcaaaagagttccgcatgcaaaaaagtcttacgtcgtttacgctggataacgcccaacaaaaatcgattaatccgcaggatgtagtgtatgaggctccctattttaaaacaagcgatggcgccgatctcggcataacgaatgtattcagcgtacaactgacaggagagcaagaccttgccaaacttcaaaaaatcgcggaagagtataatctggagatattgggagaaaacgaattcgacccgagtatctattatctttcgtgtacaaaggagtcgaaagggaatgcgctcgaaatggcgaattttatgtatgaatcgggcgcgtttgagtatgcaacacccgagtttttcgttgagtcgatgcccgacgccgctccgaacgatacctatttcagctatcaatggaatctgaaaaacgtctcttattcggggatcgatatcaattatgtgaacgcaaggaatgcctttgcttttccatatatcaacgatattatcgttgcggttgtcgataacggtgtttataataaccatgatgatttacatttgtataatgtcagttacaacgctcacacgggaggaattccaagtgggctatacggagatcacggcacaaaggttgccggtgttatcggagccacggctaataatggcaaaggcattgcaggcgttgcatccggagtgaaaatcatgcccatcagtatttgttatactgataacgagcttggcatagctgcctccaccacgaccaattttgcgaatgcaattcggtttgccgcaaataatggtgcgcgcgtaattaataattcatggtcatttgatacatcttctccaatatccgaaatcaataatgctataacatatgctcatggtaaaggatgcatcgttgttttttcatcgggcaataaaggcagtgctgtatcacagccggcagcgggagcaccttctgcaacgttagtagtaggtgcaatagatcggaatgggtacaaatcggatttctccggttatggttcttcattggatgttgtcgctcccgggcgtgaaatctggacaacagatgtgaccggtggatatacttgtgtgtcgggcacatcttttgctgctccccatgtttccggcatcgtggctttgatatgggcaacggatcccgatctttcggtatggcgggtacgcaatattatcgaacaaactacccgaaagatcggcggcaacacttatggtgtcgatccgcttcgattgaacggattatggaaccaatttgtgggttatggtctggtaaatgcctatgcagctgtatcagcggtttcggggcccgctcccaccgctccaaacatcgggacttcattgtcggaggtggaacccggcgatctttcgatgatgggtttggggtatgataaatggaatatagcgtatttggcccgtggagaagggcaagcaacgtgttctattgaaaattacgattcttctgtcacttatgtatggagcagcaccctgcctccgtacacgggtgagggcttcacatttaccgttgattttgcgtcggataccgatgaacccgtacttcacgatatcgaatgtcgggtgttgaaaaatggtctatccacatcttccggggtacatctggcattgattccgcaagggtactcttactaaattgatattggagttcctgacttacaaactgctgataatttggctgtaaatcagaggttggataaaaatattttatccaacctctgattatactgttatggggcaaacccgtgatcggcaatattctgggcgcacgacgcatccggaacttttcggtcaaagcccgatcaggacgtgttcgagccagatcaccgcgatgcccgccagatagccggacagggccagcagcgagatgcgtttgaggtaccagccgaaattgatcttttcgagtcccatcgccacgacgccggccgccgagccgatgatcagcagactgccgcccacgccggcgcagtaggtcagcaggtgccagaacagcccgtccgccacgaaactctgtgcgaaagccgggtcggcgctcgccgcagccgttgcgacgtcggccaccgggtacatgcccatgcaggccgccaccagcggcacgttgtcgaccaccgacgagaggatgccgatggcgcccgcgatggtgaacacttcgtggacattcttgtccagccagtcggccatgtcggtcagcacgccgccggtctgcaacgcgcccacggccatcaggatgccgaggaaaaagagaatcgtcggcatgtcgatgtgcttgaggactttggatacgcgcggctggatcgactcctccatgttgcggatgctgcgtttgcggtcgtagatgatttcggtcagaatccacatgaatcccagcgacaccatcatgcccatgtagggcggcagtccggtgaggcttttgaacaccggcacgaacagcagacttacgacgcccacaataaggatgaatagacgcaggcgcggaccgatgcattcggggcatcccgatgcgagggccttggcgctgaccgcggcggcggggcggtcggcgacgtagcggctggcgatggccgcagggatcacgaccgacacgaggcacggcaggaagaggttggcgatcaggttggcggccgtgacgttgccgcgcatccacagcatgatggtcgtcacgtcgccgatgggcgaccaggcgccgccgctgttcgcggcgatgacgatcacgctggcgaaaatccaccgttccttcttgttggcgatcaaccgccgcagcagcatgaccatgatgatcgtggtggtcatgttgtccagtgcggccgacatgaagaaggtgatgatcgccagcagccacatcagtttgcgcttgttgcgcgtggtgatgtggtcggtgatgacgttgaagccgccgtagctgtcgatcaggtccacgatggtcatggccccgatcaggaagaccaggatttcgcacgtgtcgcccagctggtccaccagctcgtgctggatgtgcgggtcgttgcccaggaggctgaacacggtccagatcgctccggccatcagcagggcgacggccgatttgtcgatcctggttttgtgctccagcgcgatgaacagatagcccaccacgaagagcagaatcattgtcggaatcatatcgtttgcgtttatttacagggtaactgaagcaaagatacgaaaaatccggcagaggtccggttttgtctctgccaattttgcatccgggggttggtttttgcgattttttgtttatctttgcagtcgctttcgagcgaatgtttgagctgtggtgtaatggtaacacagcagattttggttctgtcgttctgggttcgaatcccggcagctcaacacgaaaaggcggtcatgcgaccgcctttttcgtgcatacgttcgtttagcggatcttgtggtgtgagatgagcgcggcgatccacagcaggatgaccgagccgatgacggccgtcgccagactgcccagcgtgccgacgggaacccatccgaagagcgaaaagagccagccgcccagtatgccgccgatgagcccgacgatcaggttgacgaagagtcccgaacctcctcccttgacgatcaggttggcgatccatccggcggccagtccgatcagcagataccatagaaaatacatagtcttgcattttggaacgcttttcggagtgcaaaatccgtacccggccgggccggggcgttttataacgcctttttcagcgcttttgccagctgatcgggacacgacgtgccgcggccccggcagtcgatgccttcgagccgggcgacggcttccgctgccgtcatcccgcgcacgagcgccgcgattccctgctggttgccgtggcagccgcccgtgaaggagacgcttcggacgacgccgttttcgagttcgacgtcgatttgccgggagcaggttccctggcagacgtgtgttattttctgtgtcatggagttacgattttccggtttgcgggggcgaagatacgaaattcggagcctttcacaaaatgttgaaaacttcctgctccggaattttgaaagtcggggaataatggagacttttgtgacccgcaaaggtatccttcgtcccgccggggcggaggataagagggaatcgggtgcgaatcccggacagttcccgctgctgtatgcacttcaatgccgcaggcgaatcgtcgagccactgtcccgctggggacgggaaggccgcctgcgggtcggtgcgagtcagaagacctgcctttgcgcatgcaatgtcggccctgcggggaaacggggcctgttgtgaaacgtatatactcatattacaatggattacacgcagatttccatcatcaaacgtgatggtaaaaccgagcctttttctctggataaaatcgtccgcgccatcacgaaggcctttcgcgcgggcggcataacggacgaggggcaggccgtcgagcagatcgcatccgacgtggcggcggcaattacgaaggccgagatttcggtcgaggagattcaggacatggtcgaggagcggctgatgaaacgcaacccctcgatcgccaaacgttatatcatctaccgcgagtggcgcaacgtcgaacgcgaccgccgctcgtcgatcaagagcgtcatggacggcatcgtgaccgtcgagaagaacgacatcaacctttcgaacgccaacatgtcgtcgcacacgcccgcggggcagatgatgaccttcgcctcggagatcaccaaggactacgccctgaaatatctggtgggcgtgcgccacggccgcgcccaccgcgacggggacatccacattcacgacctggactactatcccaccaagaccacgacgtgcattcagtacgatctgggtgacatctacgaacggggattctcgacgaagaacggctcggtgcgcacgccgcagtcgatccagagctacgccacgctggccacgatcgtcttccagaccaaccagaacgagcagcacggcgggcagtcgatcccggcgttcgaccatttcatggctccgggcgtgctgaaaaccttccgccgtcacctgaccgacatgacgctgttcctgtgcggcgtgcggggcggcgtgacgctggagcgcgccgagctgaaggccctggtcgccgaacacgtgccgacgatcgaaccctgcgagacggcggtggggcgtctgttcgccgccctgcgccagtcgggcgtggaggtcgccgacgaggacatccgacgcatctggcggcaggcatacgacacgacgcgccgcgagacccatcaggcgatggagggattcatccacaacctcaatacgatgcactcgcgcggcggcaaccaggtggtgttcagctcggtgaactacggcacggacttttcgcccgagggccgcatggtcatccgcgaactgctttccgccacgatcgaggggctggggcacggcgaagtgccggtcttcccgatccagattttcaaggtcaaggagggcgtttcgtggtccgaagaggactatgccgcagcggtgaaggacttcgacaaggcactggctggggagatcaagttcaaaactccgaacttcgacctgctgatcgaggcgtgccgcaccacgtcggtggcgctgttccccaacttcatgtttctcgacgcaccgttcaaccgccacgagaagtggcgcatcgacgaccccgaccgcttccgctacgaggtggcgacgatggggtgccgtacgcgcgtcttcgagaatctgcacggcgaaaagtcgtcgtgggggcgcggcaacctctccttcacgtcgatgaacctgccgcggctggccatcgaggcgatgcgcgaggccggggacatgattcccgacggcaacaaacacgcgatccgcaaggaggcgcgcgaaattttcctcgaatcggtgcgcaagaccgccacgatgatggccgagcagctctacgaacgttactgcttccagcgcacggccctcgcgcggcagttcccgtttatgatgtcgaacgatgtctggaagggcggcggccggttgcagcccaacgacgaggtgggcgacgtgctcaagcacggcacgctgggcatcggcttcatcggcggacacaacgcgatggtggcgatttacggcgaaggccatgcgacctcgaaggaggcgtggcagacgctctacgacgccgtgacggtgatgaaccgcgtggtcgaggagtacaaggccaaatacgggctgaactattcggtgctggcgaccccggccgagggattgagcggacgcttcacgcgcatggaccgcaagcgttatggggagattccgggcgtcaccgaccgcgactactacgtcaactcgttccacgtcgacgtgcgcgagccggtttccatcgtcgagaaaatccgcctcgaagcgccgttccacgccatcacgcgcggcgggcatatcacctacgtcgaactcgacggcgaggcccggaagaatcccgtggcgatcctcaagatcgtcaaggtgatgcaggacgaggggatcggctacggctcgatcaaccatccgatcgacacctgccgcaagtgcggccaccgcggggtgatctactcgaaatgtcccgtctgcggttcggacgacatcctgcgcatgcgccgcatcacgggttacctgacaggcagcctcgaatcgtggaactcggccaagcaggccgaggagcgcgatcgggtaaagcaccggtaatttcgattctcaccggcatcttttgcacttcccttgcggggcgaaacagttacatacgttcgtatgctcctgcttcgccccacttcacgaagcccgaaaaccgctctgcgataatcgaaattggcggccccctgtccgcccgcctaaaatcaaaattcacccggcggaagaatccctttttgccgccgtctccggtcgcgtgcggcaagtccccgcctaaagtttagaggtgggtcagatttgtaaacacggcgttccgccgtgaatcgcgaccgacggagttgtattcatgttatgaaaacgcaatggaattattaagaatcatcggcatctatcccgaaaccatctccgacggttacgggctgcgctatgcgatctatttcgcggggtgcgcgcaccgttgtcccggctgccacaaccccgagagccacgatccccggcggggcgagccgctgaccgtggagcgtgccgaaactatctgcgccgcaatcgccgcgaatccgattctcgacggggtgacgctcagcggcggcgatccgctgttgcagcccgaagccatggcagcctttctgcggctggtgaaggagcgcacggggcagaacgtctggtgctatacgggctatacgctcgaagagtgtctcgccgacccggcccgccgggagtgccttcggtggatcgacacgctggtcgacggacgctacgtcgaggcgctgcgcgatctgtcgctcgatttccgggggagttccaaccagcggatcatcgacgtcggggccttgcacctgttcggataggtgtgtgaaaaaagagctgcaaatccttgcagctcttttttatgcgcgggttatctctactgacgctggaggtccgaattgtcggctacgaccatgtttttgtcgatgcgcagcgtcacattgccgtcgacctcgatcagcagggtggtctccttgatctccttcacgacgccgtagatgccgccggcggtgatgactttgtcgccttttttcagaccgttgcggaactcctgcatctgtttgcggcgcttggcctcgggacgccacatgaacaaccagagaaccagcaccatgaggccgatcataataatgaaactgtactgctgcatgaatcccggttgaggctctatggggaccgtctgaagaaaattaatcataattgtattcgttttaagtgtttattccattgaacgaagcaaaggtacaaattattgccgaataaacaaggatttattttatgtccgcttccacgaacagccgcaggggccgctgccctcccgccagcgtgatgtccagcgccttgagttgccagccccgttcgccgcgcgaatcgaaggtgagcgtcacctgccgtgcgtcgcccggtgcaatcggttgtgcgtcaaattcgagcgtcgtgcatccgcagctgcgccggtaggaggcgacggccacgggacggctcgcgtcgttggccagccagaggcgcagcacggcgatttcgccggacccgaggcgtccgaaacgcacggtgtccgtgcctcccgtggtgagaatcgaatccgttagcgagataatccggcccttgcgttcgaccgcacggggagatgtgccgcagccaacggcgagtgccgccagggcgaggatcgcgagcatgcgggtcatggccggcaggggtcagatcaggccgcgcccggcctttttgatgcgtccttccgcggtcagcgactcgacgatcttgtccagcacgccgttgatgaaggtgctgctgcccggggtggagtagtatttcgaaatttcgatccactcgtcgagcgtcaccttgacgggaaccgacgggaacgaagtcagctcagccatcgccgtgccgatgatcaggttgtccatgaagacgatgcgctccacgtcccagttggccgtgaacttctcgatgtagtcctggaaggcggagtagttgaccagcgacttttcgaacagcgtcttgacgaattcggggtcctcgctgcttttgaacttcgcgggaaccttcagttcggtgtgcgagacgcgcaggttcgaaagcgtgcgcaggaccatgatcacgatgtagggaaggtcgtcggtccagaggatcgacatctcctccagcacgtcgtccagcgcctcgcagctctgcaactccttgaagaagtcctcgagcagctttttgtcgtcgtcgaacgagcgctcctcgcgctgcatgtagtccttgtagtagtcgctctcggtcaactgcgcgtagagcgtgcggatcagttcgggatagcgttcccatcccagtttgcgggccgccacgtgatcgttcaccgcgtcgctgttggcgatggtgcggatcacggcgttgtccacgaacttggtgttggggttgaggtcttcgaatgtcggcagtttcttctgtttggccagctcctgacgctgttcggcgtaacgcgcgatctccacggggaggatcagtatctggaaatagaggtcataggccttgtcgacggacgccatcagcgttttttccgacgccatcatgttatccgcgcccgatttgagatgggcgaacagcgccttgacgacctttatacggagtaatcttctgctcaacatttttttagaacgatttttaacggccgcaaaaatacaactaaaaatcaagaataaaaaattaagccgggagaattctttctccgggcgatttccgcgcggccgtcgcggcggattccggcgtatccgaaaaaacgggaggcgcgatggcctcccgatgctgcaactacttttcccggatcgactttttcttgcctacatgactttgatagacacaataaacgattccggccacgagcaggacaaggatgcaatagccggtgcttcgggcgctggctttgagcatgctttcgagagacatttccggatagagaagcgcgaagacacaaagaaaatagatgaagcaggcgcccatgtttcgcaaggtgaggaaccgggaaatactcaaatcgtcgtctttcgtctcttttgcatcgggaaccggacacgtatcgggacgtttatccggaccctttctgattcggttccaaaaatagacggccgaaaagatcacgatgcttacgatcgtataaatgacgatgcaccgcacgaggcgtcccggagagcaatcttttccgggtgtgggcagaaacgctataatcatcagaacgacgtagaaattagccaatcctttgagaaacactttcagctcggttttgttcatggcagattcattttaaattccctcttcggcctcgcctccgaaataatagcaatggcgttttatattggtcctaatttaggacattggattttgaaataaaagaggcgaacggataaatagaaaaaaatatactgaattgcgaaagaaatatactctgccgaccgcctgcggggctctttgcatcctgatttttaatttttaattcttaatttttaatttgcttttgcctatctttgcacccgtatggaacaattggaagaaaaacagcctttcgacgtgatcgtcatcggggcgggcgctgcgggcatgatggccgcgggtacggcggcgcgcagcggcaggcgcgtgctgctgatcgaaaagatggagaagtcgggccgcaaggtccgcatcaccggcaagggacgatgcaacgtcaccaacgcgcgtccggccgaggaattcgccgatcaggtgcgcaccaacgccgaatttttcaaggtcgcgttctcggagttcaacaaccgggcggcgatcaagtttttcgaacgcgcaggcgtgaaactcgacatcgaacgcggcgaccgggtctttccgcagagcggcaaggcgtgggacatcgccaacgccctgctggagttctgcgtcgaaaacggcgtcaagatcatctacaatacgcgtgttacggagattctgaccctcggggaccgggtcttcggtgtgaaatacatcaaccggcgcggtttcgaacgcaaggaggagtgcgcgcaggtgatcctcgccacgggcggcgtctcctatcccgcgaccggatcgacgggcgacggctatgccttcgccgccgacctgggccatacgatcgagccgctgcgtccgtcgctgacgccgctcttgtcgtcgcacgcccagatgagatacctcgacaaggtgctgctgcgcaacgtgcgcgcgacgctctatgtcgataacgaacccgtgcgcgaggagttcggcgagatcggattttccgaccgcggcatcgagggcgccgtggcgctgcgcatgagccgcgacgcggtggacgccctgatcgaagagaagcgcgtgaagctggtcctcgacctgaaacccgcgctcacggaggaggtgctgcacgaacgcatcgcccgtgaaatcgccgagctgcaacccaacgagttcttcggcgaactgctgcgcaagctggttcccaagccgctggtgatgccgctggcgcaggaggtggacatccgtgcgaactgttacgtcggcaaaatcaccgaggaacagatcacgcgtctggtgcgtacgctcaagggactgactttcccgatcacggactatgcgccgttcgaatacgccgtggtgacggccggcggcgtgcgctgtgacgaagtgaatccctatacgatggagtcgctgaaagtcaaagggttgtattttgccggcgaggtgctcgacatcgacgccaatacgggcggttacaacctccagatcgccttttcgacgggccgcctggccgggtcgctgaaaaaatagacgttatgaagatcgtcggccatcccatttctttccggttgcccgggcgggtttccgaactgcgcaaccggctctcacgcgcccgttatttccgcggtcacggagtccattcgccgttcgtctacgacattgtgcgcagcgtcttcatgcgcgacgacctgctgccgggccgccgggacctgtacgaagccctgctcacggcgggcgtttcccgccgtcgggcggtgcagttgcagaatctgatgattcattgcggctatacgacctttggtctgaatcgtgcggatgctgaattctgcgtcgccacgtgcggcctgccgcgccctgcgacgctcgcgctggtgcgtgcggcggccgaagcggggcataccgtggcgctgatgtcgccctacgacggctgcgaacggcaagcgctgtgcgggcagattatcgcgggacacgcttcgacgacggtggataaccgcggttacctgctgattttcaacaaccatttgccgaaacaacatttcaggatatgaaggtatacacgaaaacgggcgacaagggaatgacctcgctgatcggcggcgagcgggtcttcaagaccgacgaacgggtcgaggcttacggtacggtcgacgaactggctgctttcacggctctgctggccgacaacatgcgcggcgacgctgcgttggcgtcgtcggtcggcgacctgaaccgcattctttcgcggctgatgtcggtcgaggcgctgctggccacggggcagtcggggagcgacaaggtcgctccgctggacccggagaccgttgcatggctcgaagggcgcatcgacgccatgcaggaggttctgaaaccgattgataaattcacgattccgggcggaaacgctgtggtgtcgatgtgccacgtgtgccgcaccgtctgccggcgcgccgaacgcgccgcgctccgtgccgacgccagatacggcgtcgactccacggcgctggtctggctgaaccggctttcggactatttctacctgctggggcgcaccctcacggcccattatgccgtcgacgaggtcctgtggattccctgacctggccgggtatgtaaaatgcgaagcggcacattccgggaatcgtgccgcttcgcattgatttattttgaggccgccggcctcaaaatcgctttttagtattcttcctcgttgaagaagaaatcgtccttggaggggtagtcgggccagatgtcttcgatagattcgtagatttcaccctcgtcttctatctcctgcaggttttcgagcacttcgagcggcgcacccgaacgtactgcatagtcgatgagttcatctttcgttgcgggccagggggcatcttcgagtttcgatgccagttcaagcgtccaatacatagtcacaatatttttaagttcccaattgtcaacggattatttgtcctcaaggggtgttaacccgttatggctgatttgcaaaagtataaaaaaaacgagaaaaacaaagaaaaatcggcaaaacatcgtgcgtgtgttattatgtggttggtaaccaatgttttgagcggtgaaaaaaactcggctgcaaattgcggcgaaagggttttgcctcctccggcgggcggcgttccgtggaatatgccgccgtcgtttttttgcggagttcgttttttatcgtatttttgttatgattcgaaataatacgacttattttaaaaacgaaaaccccgactccatgatccgcatcagccgctttttcctgccgtttctctgttgtctgacggcgcctgccctcgccggtacgcaaacccgctgggaggtggttcccgacagcacggccatcgtgtggaatgtccgcgagggcgattcgcaccgggaccatatcgaaatgagcggattgcggatttccgccgtcctgcgctacggtgtcggcgccgacggcagtttccggttcgaacgcagtatcgtgtggccgatgctgcgcaccatcccgaacaatacgcacggttcgctgatgcggcgtttcgtgtgggacgttccccggatgctttcggtcaatgagaattgccttcagcaggagaaggtccgccggatcgtgctcgacggcacgatgaccgtcgagagcgactggacggcggtcaaaggctcgctttcgctgacgcgtgtccttttcccgtcggtcgacgaggctgccttctgcgaaaaatacatcctgaagaatacgggcgagaagccgctttacgtcgagattccccgggcgcgttcggtgatccggacagctccggcaaagggcgtggagggcagttacgaactggtggccgagatctgcggcgacacggcgctgatgctcgctccgcgggccgaggtcgctttcggggcctttttcagcggccgccggtccggggacgaagccttggcgctgaacgccgacgcggagtgcgccaaacgccgtgcgctggtggccgaatggcagcgcaatctggtgctggacacccccgaccccgtgatcgacgccatgttcgcctttgcgaaaatccgcgctgcggagagcatctacgacaccaagggcggtctgatgcacggtcccggcggcgagcgtttctatgccgcgatctgggccaacgaccaggccgagtacatcaacccgttcttccctttcctgggctacgaccggggcaaccgctcggcgctctgctcgttcggctatttcgctcgctacatgaatcccgactaccggccgattcccagttcgatcatagccgaaggaaccgacatctggaacggcgcgggcgaccgcggcgatgcagccatgatcgcctacggtgcggcgcgttatgcgctggcgcgcggcgatgccgccgaagcggccgaagtgtggccgttggtggagtggtgtctggagtactgccgccgccggctgaccggcgacggtgtggtggcctccgattcggacgaactggaaggtcgcttcccggccggggacgccaatctgtgcacctcgtcgctttattacgacgcgctgctctcggccgcaatgctgggccgcgaactgcataagcccgcccggcagctggccgcctacgaacgtcaggccgccgcgctgcggaaaaacatcgaccgccatttcgggggcatggtcgagggcttcgacacctatcgttattatacgggcaacgaccgtctgcgtgcgtggatctgcattccgctgaccgtcggcatcgacgaacggaaggaggcgaccgtcgaggcgctcttttcgccgaaactgtggaccgaaaacggtctgctgacccggtcgggcgacaagaccttctgggaccggtcgacgctctacgccctgcgcggagtctacgcctcgggcgagaccgagaaggccaccggctatttgtcctattattccggggtgcgcctgctgggcgaccatgttccctacgccatcgaggcgtggcccgaaggttcccagcgtcatctttcggccgagagcggcctttactgccgcatcctgaccgaaggggtgttcggaatccgtccgacggggttccggtcgtttaccctgacgccgcgcctgcccgcggcgtgggaccgcatgaacctgcgcaacgtgcgcgccttcggctcggcgttcgacatcgaggtgcgccgtgcggcgaaggggatggaggtcgccgtgacgcaggacgggcgggaggtcgtccgcaagaggctccgcgcggggcagagcctcggggtgacgctggaatagaaaaagagagggaggtttccgaaaacctccctcgtttatttcaccgcgatgtagaacaggtcgaaacaaccgtctcccaccggttcgatgcggtagtcgtccatgcggatcgaggtcgtcagcccggtgttttcccggaggagtttgcggcggttcatgcggttgaggatgtcgtaggggatttgcagcatccagcgcggcaggcggtgctggaggtcgagaatgtcgaagcgcgtgatgcgttcgacgccgcggcggttttccgcatagtagtccatcaccttttcgttgccgaagaccccgagggtttcgatctccgaaaaccgtgcggcgagcagcctgcggagttgttcggccgtgtattcgcgcacgtgccacgggttgcgggtgagcgacatcggggcgttgggggtcgtcacgatgaaccgtcccccggggcgcagcacccggtgtatttcgcgcacgaactccgcatcgcgtttgatatgctcgatcacctggaacgagatcacgcagtcgaaacttcggtcggggaagtccagcggcgggaccactgcctgccggaactcgacgttggggcggtcgagcagttccggcgccggggcgtgcttgtcgacggtgacgaaccgccgcgcccggggcgccgctacctcgatgccgtagccggctccggttccgatttcgagcacgtcgcccgcgatgcgcgccgaggcggcgtggtaggccagcagcgagcgctggaaaacgaaattgtccgaggcttccgccgaaacgcgctccgcggtgttaatcttcgccatgtttccggattttgatgcctttttcgccggcttcgaccgcgccgcgcttgaggagcatgcccagcgagcgtttgaaaacctttttgctcgttcccgtgaggcgcgtcacctcctcgggggcgctgtcgtcgttcaggggcaggaatccgccgttgtcgcggaccagctggagcagcacctccgccgagtccttcacctgtgcgaatcccgtctgctggaggctcacgtcgatgcggttgtcctcggtgatacgcctaacgtaacctttcagccggtcgccgacggccacgggacggaagatctggttgcggtagatcatgccccagtggcggttgttgacgatcacgcggaagccgatttcgctctccgaggccaccagcagcgagacctcctcgcggggtttcaccgtgatcaggtcgttgtttatgaaactcttgagtttggtcgtggccacgcagcggcccgtgatgttgtcttcgtagaggtagacgatgtagctgtgtccggccaggatgccgccctgctggttgcggttggggaggaacaggtccttgccgtgcagtccccagtcgaggaaagccccgtgggccgtcttgtccaccacgcgcagatagcccgcttcgccttcgcgcagcagcggcgtttcggtcgtcgccacgaggcggtcctccgagtcgtggtagaggaagacctctttccggtcgccgaccttgtccgtcagcgaagtgtagcggttggggagcagcacttcgttctgctcctcgtcggcgaggtataggccgtattccgatacgcggcttacggtgagggtttgtatgcgtcctgctttcaacatggtttttccggtatatacgctgcaaaagtacgtttattttcgtccgaatccaaacttcgcgggccgtactgccggaagatgcggcggatttgccggcttgcggagcgaaagttttgcggattggccgaaaaaccgtatctttacgaaacgtaaaaatctcccgaaatgatgaaactacgccgatttctgttcctgctctgggcgggattgctggtagcggccgccgcgtgcgcccagcctgtcagcacgctttacgacaagaccgaataccgtatcgccatgcgcgacagcgtgcgcctgcacacctcggtcttcacgcccaaggcccccggcaaggccccgataatcattttccggacgccttacggtacgggaccttacggcgagggacagtttcccggcagtttcgaaaaaggctacatgcgcagctacgtcgaccgcggctacatcatcgtccggcaggacgtccggggccgctacatgagcgagggcgagttcatgcacgtgcgtcccgcgggcttcggcagcgtggacgagacgacggacagctacgatacggtggactggctggtgaagaacattcccggcaacaacggccgtgtgggtttcgcgggatgctcctacccgggattctacgccctgatgggcggtttgagcgggcatccggccgtgaaggccgtttcgccgcaggcccccgttacggactggtacatgggcgacgacgtgcaccacaacggcgtgctgatgctgagcgacgccgtgcggttcctcaattcgatgaacacgcccgctggacacgagccgaccgacaagatgccgcggcgcgggctgacgatctcgcccgacgaacgcacgttcttcctcacggagcgccccacgcgggctgacctgacgaaactgctggcacccaatgcgttctgggaggagatggccgaacatcccgactacgacgagtggtggcgcgcgcgcgacacgcgccgggcctgctacaacatccgtcccgcgatgctggtcgtgggcggcacgttcgacgccgaggattgctacggggcctggaacctttacaaagccgtcctgcgccagagcgcccggactccgctccatctggtcgtcgggccgtgggcccacggggcatggcgcggcgacgggcgtacgctgggcgacttcgatttcggagaggaggcctccggagcctactatatggaacatttcgaggcgccctttttcgactgctacctctgggcgcgcgacacggtcgaccggctgccgcccgtggcggctttctcgtcgggcgacaaccgctggcatacgttcgggcggtggacgccttccgaggcccgcaaactgactctttacctcgccgacggcggccgcatcacgaccgaaaaaccgacggtgaaaaactcctcgacgagctatacgtccgatcctgccgaccccgtgccgtatatcgcaacctccggcacgcggcgtcccaaggagtatatgatcgccgaccagcggtttctggagggccgcaaggacgtgctgacgttcgtgaccgaaccgcttgcggaagacgtgacccttgccggtccggtcgaggcttcgctgaaagtggccctttcgacctcggatgccgatttcgtcgtgaaactgatcgacgtttaccccgacgagggtgaaaaggccggcatgcagatgctcgtccgcggcgacgtggtgcgcggccgttaccgcgacggcttcgcgcgtccgaaagccttcgtgccgggcaaccccgagaccgtgcctttccgcacgaccgacatcgcccacacgttccgcgccggacaccggatcatggtgcaggtgcagagttcgtggttcccgctcacggagcgcaatccccagcagtatgtcgacctgtggcgctgtgcggcgtcggatttcgtgccctgccgggtgacgcttttccaccagcgcgactgcgcgtcgtcgctgaccgtctataagctctgattttcgtggaactccgcatcgccctctgccagtgcgacatcgcctgggaacagcccgcgcggaacctcgcgcggctcgaaccgatggtcgctgccgccgaagcggatgtcgtgctgctgcccgaactgttcgccacgggcttcacgctcgatcccgccggagtggccgacggggccggcggggcggtcgtcacggccctgcgccgctgggccgcccgatacggcaaggcggtcgcaggcagcgtcgccgttgccgaaaacggacgtttctacaaccggatgtatttcgtgaaaccctcgggcgaatttatcggctatgataaacgccatctgttcgcacccggcggcgaagcgcgccagtacacgcccggcgacagccgtgcggtggtcgaatacggaggcgtgcggttcttgctgctcgtctgttacgatttgcgttttccggtctggagccgttgccggggcgattacgacgccattctgtgctgcgcctcgtggcctgcgccgcggcgcgaagtgtggcggacgctgctgcgcgcccgggccatcgaaaaccagtgctatgcggccggggtgaatcgggtgggggatgaccctgcggcccgttacgccggggattcggcgttggtcgacttcaagggccgcacgatggtcgaagccggcggcggggaacgaattctgacgggcgtgttcgacacgggggcgctggcggcgttccgcgaaaaattccccgcgtggcgggatgccgacgaattcgttttaaaatagacgtgtcatgcgcgcgggggacgccaatgcctgttatttttcccttcagacgattatttccgctgatttattttgaattcagcggaatttgaatacctttgttttcagctatgaaacgatctgacagcgatagaacgggttttcgttcgggaaatgaaacgggaggtaaatttcttccccattggctctcggctgtcgatcgacttaccccccccctcgcgctgttccggttgaatttctgaatccggctttccgcgattatataatgactctgacaaggggttgttgtgttttgtcgtgtcgtatctcgaaatcactctcatccaataaaaaatgcgtatgaaatccaaaatctttacatcgttcctgttggcggcagtgctgctgtcgggatgcaagaaggacgatccggctccggataaggcgactttgtcggtcagtccccaaactgcgattgcctttacggctgcggcgacggagaccttcaccgtaaaggtcgtcaccaatcaaccggcgtggaaagccgagtcttcgcaaagctggtgcaaggtcgctgcgggggagggtcagtttacggtttccgccgatcccaatacgtcggaaacagctccgacgccggcggtgattacggtgacggccgggagtgaaaaggcgacgattgatgtcacgcagtccgccgccgggaaggagcaatatcccgataccgaggccaaactgaagcaggctatcgccaaagtgtggacttttgcggagagttcgaactatgtttcgctcgagttcacgaccgacggcctttatacgtttttatccaaaacgccctttacccgggctgcggagaataatatctacctgctgtcgggcgcctattccgttgctgccgatctgcacgaactcacgttgagcgatttcggcaaaatcaccatcagcgacgtggggaacggcaaagcctccatgacgatcgccccgaccggcggaactccctccgcggcggaactcgacgagcagcgtttcgtaactcccccggcgtcggcggataagaagatcaaacgggtcgagtcgaaagaacctacggagggaaacggcgctatcgaatacagttacgatgcgaatcggcggatgtcgaagattaaggtaacacagggcggcctgacgctggaaattccgatcaattacgaggatggcaaagtctggtatcagttcgaaggcggcgaggtcctcggagagccgggcgtgtttaaggttacctatacgctcaatgcggcggggctggcccgctcttcggttattcagcacaaaggcgtcgtgctctataagatatactatacttataacaaccagaggcagctggtctcctatcggatgacggacaatgccgggaaactcgacgggttttgcaatgccacgtgggtgaacgggaatgtggtgagcacttattccgagagcgtgcacacctgtgacggcagttatgatgagtatgacgggcataaatattaccatcacgaccataacggcgacggcattttcaaccaggaagatattatcacccgcgagacggaccatagcacgtacagctattcggcccgggagaacaagggtggctacatgtatccgatcgttacgcccgatatattcggctcttccgatgttttcgatcagttgggccagtggatcggcgtgctcggcgtctcctgcaagcacctgatgtcggaacatgcggatgccgacggtgcgttgacctaccaattcgacgccgaagggtatcctacgcgcatcgacgtgtcgttcccggaggatccttccgataactggtatatcctccagacctacgagtaggggcgttaataccggtgattcgtgtaaagtccgtccgaaatgccgcaaggcattcgggcggacttcgttttttcagcgtcggaaccctgaccgcgacaactgcggagaagacaatgtattgaaaaaaaacgtatctttgcacgttgctgatttgcgatccaataaaccggacgttccgcacgtttacatacctgaaatggaagatacgatcaaaatactgggcgcccgggttcacaacctcaagaacgtggacctcgaaattccgcgccgcaaactggtagtcgtcaccggcctctcggggtcgggcaaatcgtcgctggccttcgacacgatctacgccgaggggcagcggcgctacatggagacgctgtcgacctacgcgcggcagttcgtggggacgatggagcgtcccgacgtggacaagatcacggggttaagccccgtggtggccatcgaacagaagacgaccaacaagaatccccgctcgacggtgggcaccgtgaccgagatcaacgacttcctgcgcctgctttacgcgcgggcgtcgcgggcctattcgcccgtgacgggcgaggagatggtccactataccgacgaccagatcgccgagctgattctcacgggcttcgccgggcgtaagatcgccctgatggcccccatcgtcaagggccgcaagggccactaccgcgaactgttcgagtcgctggccaagaaggggtacatctatgcgcgcatcgacggcgagatccgcgaaatatcgtcgggcatgcgcctcgaccgctacaagatacacaccatcgacctggtggtcgaccgcctcgtggtcagcgaggagtcccgcgaaaggctgatgacctcgctgaaggagtcgatgcgccagggcaagggcacgatggccgtccacgactacgggaccgggcagcagcgtttctactcgcgccacctgatgtgcccctcgacgggcgtggccttcgaggaccccgcgccgcacaccttttcgttcaactcgcccaagggcgcctgcccccattgcaacggactgggcgaggaggcggttttcgacgtggggaagatcattcccgatgcccgcctctcgctgcgcgaaggggccgtcggaccgctgggcaagtaccgcaacaacatgcttttcgccattctggagatgctgggccgccgttacgatttcacgctcgacgatcctgtcgaaagtttctccgaggaggcgctgaacgccgtgctctacggcgattccgagccgctgacggtcgacttgcaggagttctcgtcttcgggcggacgccagttcctctcgtgggagggcgtggccgagtacatcggccgcaccgaggacgacgattcgaagcacggccagaagtggcgcgaccagttcctcgtctaccgcaaatgttcggtctgcggcggttcgcgcctgcggaaggagtcgttgcagttccgcgtcgccgggaagaacatcgccgaggtgtcggccatgtcgatttccgagttctcggagtgggttcccaccatcgaaaaacagctctcggagaaggagtggaagattgcccaggagatcgtcaaggagatccgcgaacgcctgcggttcctgatggacgtggggctgggctacctctcgctggcgcgttcgtcgcgttcgctgtcgggcggcgagagccagcgcatccgcctcgccacgcagatcggctcgaaactcgtcaacgtgctctatatcctcgacgagccgtcgatcggcctgcaccagcgcgataaccagcggctgatccgcagcctcgaagagctgcgcgacgcgggcaactcggtgatcgtcgtcgagcacgacgaggacatgatgcgcgccgccgacttcatcgtcgacgtgggaccccgcgccgggcgcaagggcggcaacatcgtggccgccgggacgttcgacgacatcctccggtccgacaccatcaccgccgattacctgacgggacgccggcggatcgaaattcccgaaacgttgcgcaagggaacgggcgggcgcatcgtgatccgcggcgcgcggggcaacaacctcaagaacgtcacggcggaatttccgctgggcaagttcatctgcgtgacgggcgtcagcggttcgggcaagtcgacgctcgtcaacgaaaccctgcggccgattctcgccagagagctttaccgctccttcgaccagccgctggagtacgacggggcggagggcctcgaacatatcgacaaactggtcgttgtcgaccagtcgcccatcgggcgcactccgcggtcgaatcccgcgacctattcgaacgtcttttccgacatccgcaagctgttcgagatgacgcccgacgcccagatccgcggcttcaaggccgggcgtttctcgttcaacgtcaagggcggccgctgcgaggagtgccgcggggcgggcgtgcagaccatcgagatgaacttcctgcccgacgtctacgtgcgctgcaaggcgtgcggcggccaccgctacaaccgcgagacgctcgaagtgaagtacaagggcaaaaatatcgacgacgtgctgaacatgacggtcaacatggccgtggagtttttcgagaacatccccaatatctaccagaagctccgggccattcaggaggtgggcctcggctacctgacgctcgggcagccctgcacgacgctgtcgggcggcgagagccagcgcatcaagctctcgtccgagctttcgaagcgcgacacgggccgcacgctctacatcctggatgagcctacgacggggcttcatttcgaggacatccgtctgctgctggaggtgctgaacaagctcgtcgaccgcggcaatacggtcatcgtcatcgaacacaacctcgacgtcatcaaggtcgccgaccatattatagatataggtcccgagggcggggcggccggcggggagatcatcgtcgcgggcacgccgcacgaggtggcgcagtgcgagggcagctacacgggtcagttcctcaaaaaactggggttgtagcgtctccgtctgtccggcggggcgctctgccgtgaggctctgaaactcgtcccgagggagggcggcgtatgcaaacgccgacgcccgtgacggcaacggtgtccggaagcggaaagtggcccatgatcccgctttcggcacaaaacttgctttcatagccgtaacaaaccttatgtgctatgaaaaaaacagtcattatcgttgtgggcctgctgctctgtgcggcggccgttaccgtgatcggacagaaaaaagtgctgtcgcccaaggaagaacgccgcgaggtgcgcgagaaacgccgtgcggaacgtattgccaactacgagaagttcatggactcgctcgtgctgtcgcgcaacttccagttcaacccgacgaccttccagcgtcagcccgcaggtccgatgcgccagattatgaaccccgcgttcaacgtcggcatgtgggacggaacggcggacatcacgcttccctacatcaagggttacgtgccgccttactatgtgacgatcatcaattacaccgtttccgatttgcagggctatatcaccgagcagacgcacgaaggctggatggtgaccttctcgacctcgctgttctcggcgtcgacctacacgttcaccttcgaaatcttctcccgcacgggcggtgctacgctgacgatcaccaatccgtggtataaccccgtgcagtatacgggttcgatttcgcagctctattgacgtaaatccattttgccggacccatcccgggcagccgtatccgctgcgctgtccgtttgccgctccggcgatccccgaacccccgcctcaggcgggggcttttttcccgttcaatccgatgtccgacttatgaaacactccgttttttccacctgcggcgcactctctttcattgcctgcgccgccgtcgcgcagaccccgcagtatacgctcgaaacttccgccgcggacagcgtgccgcagacgacgatcgttcccgtgcagcaggccccggtgcaggtcgtggagcatacgaccgtctacgaggagcctgcggcggggatggaccgcgcccagcgcagggcttataaggcccgggtctacgccgcgaagatcgactcgctggtgcagtcgcgcgactatatgttcttccccaactcgatgcagcagctacccggcggaatgatccgttcgatctatgccgactacttctttttcggggtgttcgtcgaccatgtcgaggtgcacctgcctaccgaacggggcatcacccagtatgtcgagatgctgaatttcgattcgatgtcggtccgcgactaccgggcggcccgcgtgcagtggggctggtcggtctccttcaatatttcggacggcaacacgctctaccacgccgatttcgccgtctcgaccgccacgggcgaaacggtgctgacgctcctgacgcccgacgtcacgatgcgctacgtcggctggctgtggaacaagcgggtgaacgacccgcggtatcgcaggatggattagaaaatgaaggataaaacggcgccgaatcaattataggctccgttttatctgaaattactcggtactcatggccagcctcaaacctacataatccgaattgtaagattgtgcaggcctgtgtgatacgcgtgcggaattggaccaaatagcccaacatccgccccgtataacgcgcatagacccgctttgcggaccttgtggatttgtttgaggttcctcgggataatcgcccagccagtcactgcaatattcgtaaagattaccgcccatgtcatacaatcccagttcattgggtaataactgttttacataatgcgggctgtttccattgttacgtaactcccaataatcccacttgttttcattgagtatataggttccggcattgttgtaacaccaggccgccaggatcgaaatgtcgaagcccggataaatgtgtccctgggatcggttgcctccccgtgctgcatattcccattcggcatcggtcggtaaccggaattttaatcccgttgcttggttgagacgttcgataaaaggttgaatgtcgttccactccacgccttgaggcttatggtattcagaatagtcgcactctgtttccataactgcgctccaaagttcctttgtgacctctgtttctccgatataaaaggtattgagcgtcactttatgtacaggatattcggtgcgatccggtttccagccgctcgcctcctgttcacgggttgctcccatctggaatgttcctccatctacttttaccatggtaaaagaacagttcttaaatgtaatttcttttaccggaacattctgttcgtttttcgaatgtccttcgtcatcatctttgctgcatgcgaccagacagatcgccaagaacggcagcagaatacggttttgtttcattttgatagattggttaagggttaagagtcaataaaaaacgcggacaaattcctttatccacgtcggaggtattggacgacctacaagtaagatgaaagaaatgcccgcgccgtaaaacagcacgagcatcgcctttagtcccttacttgttagaaagtgtccaattttccgacgtaagaagaaaagccgatgcactttttatatgtcgtgtgcccgcaggcacggagttgaaaggttgttttctactgcttcataggcgtcgcggtttggtgtttgatcgtacaaatataagcaattctgaattctgaattgtaaattctgaattatttcctgtccgcaggacggtaaataagcgccacggcggagacggagatgccttcctcgcgcccctcgaagcccagatgctccgtggtcgtggccttgaccgacacccggtcgtcgtctacgcccattgcgccggccatcgcacggcgcatggcgtcgatgtgcggccgcaacctgggctgctgggcgcggatcgtgcagtccacgttcccgatctcgtagcccttttcgcgcagcagttccgccacgcggcgcagcaggatcttcgagtcgatgcccgcaaaatcggccgacgtgtcgggaaagtgcagcccgatgtcgcccagcgccgcggcgcccagcagggcgtcgcacagggcgtggatcgccacgtctccgtccgagtgggcgacgcaccctttcgtgtgggcgatctccacgcctcccagaaccagcggcaggctgtcggccagagcgtgtacgtcgtatccgtgtcctattctgaaatccattcgttcccgtattttatattgtcaaagttacggattttttcctaactttgcaaaaatgcaaaaatctatgtcggaaataacctctttggaaccgcgtcttgtctgggaacagttcgacgccatcacgcgtgtgccgcgtccttcgaagaaggagggcaaaatcattgattttctggtcgatttcgccaaaaagcaccatatcgaatataaaaaggacgccatcggcaacgtcgtgatgcgcaagcccgccacgccgggcatggaggagcgcgcagccgtgatcctccagtcgcacatggacatggtctgcgaaaagaactccgatgtggagttcgacttcgacaacgatcccatccgcacgcgtatcgacggcgagtgggtccgggccgaaggtacgacgctgggcgccgactgcggtatcggcatggccgccgcgctggccgtgatgctcgacgagacggtggagcacggtcccgtcgaagcgctgttcaccgtcgacgaggagacgggcctcacgggtgcgttcgagctgggcgaggggatgctcacgggcaaatacctcgtcaacctcgattcggaggacgagggcgaaatcttcatcggctgtgcgggcggcatcgacaccatcgccacgttccactacacgatggagccgtcgccgaagaactacacgttcttccgtgtcgacgtgtcggaccttcagggcggacactcgggcgacgacatcgacaagggccgcgtcaactcgaacaagaccgtggcgcgcctgctgtgggacggcatgcagtcgttcgaactcaaactgtgctatttcaacggcggcaacctccgcaatgccattccccgcgaggcttacgccatcttcggcgttccggcccgcttcaaggaggagttcgtcaagcgttacaaccttttcgccgcggacctcgaagccgaattccgcttccgcgaacccaatttcaaaatcacgctcaacgagatgccccacgtcgacgaggtgctcgacagcaggacgcagtcggcgctggtctactcgttggtgggcgttcccaacggggtcgtggccatgtcgttcgccgttccggggctggtcgagacctcgacgaacctcgcttcggtgaagttcgcggagggcaaccgcatcgttgtcacctcgtcgcagcggtcgtcggtcgagagcgccaagacctacgtgatgcagatggtcgagtcggtcttcgcgctggcgggcgccgatgtggcccattccgacggctatccgggctggatgcccgacccgcagtcgaagctgctggaggtcaccgtcgatgcctacagacggctgttcggctccgaacccaaggtccgcgccatccatgccgggctggagtgcggtctgttcctcgaaaagtatcccgatctggagatggtctccttcggtccgacgctccgcggtgtgcattcgcccgacgaacggctcgaaatcgccacggttcccaagttctggaaactgctgaccgaagtcctgaaaacaatctgattccgattccggcgtccccgctgcggggacgccggaatttgtcatgccccatccccgtctgacgctgcttctgccgtgtcgcgacggcttttctgtttgccggaccgttttgccgcgctgcatgcgatccggttttgaatcgtcggactttttgctatctttgtgttctgtaaagtcgcaaagatatgctgaaaagccgttgtgccctgttgtttctcctgtttccgtgtgcggcggcggcccagtaccccggcgacgaatactatccctatgccgaacgcgaggagcggcgcgaactgctcacgaccgattcgacgatcttctaccgcgccgtgcagtccccttcggacctctacggccttcgcaccggtttcaacctgccgcaggtcgcgctccggcgccgcggactggattacaccctggaacgcacgtcgctcatgggcgttgcggtttcctaccgttacctcgcggcgctgcgcctgctcggggccgaagaacagcgctatgcggggcttgccgccgcgcccggggagccggctgcggcgggcggcatgcgggcgttccggttttcggacggggagccgttgcagccttttctggcttcggtccgcttcaccgaccgcaattacctcgtgggagcgaaagccgccgtctcggcgtcgccgggcgacggctggcgcatttcggcggctctcgacgcccgctccggccgcgacatgcacgtcgaaggggtcttcaccaatgccgtgaccgccggactgcgccttgcccggcgtttcggcgaagggcacgaactctccgtgctgtgtatcgtgccgccctcggtgcggggcacgcgcctctcctcttcggaggaggctttcacgctcacgggcgaccgtctctacaacccggcgtggggctggcaggacggcagggtgcgcaactcccgcgtgcggcgcgagacggttccgctggccctggccgcctatgccgtgccgctgtcggcttcgacctcgcttgccgccacgcttgccgccgaggcgggcgtcgcgaagtacagcatgctcgactggtacgacgcccgcacgccgatgcccgacaattaccggtatctgcccagctatacgggcgaccgggagaccgagcaggcgtggctcgcccgcgatccgcgctacacgcagatcgactgggacgagctgatccgccagaaccgcatggcgggcggacatgcggtctatgcgttggaagaccgtgtcgaacggctctgcaacctcgctttcgacgcgtcgttcgccaccgaagccgacgcccggctgacgctccgctacggagtttcgctccgccgcgaaaacacccgttcctacaagcagatgcgcgatctgctgggcgccgggtacgttacggacatcgaccgcttcctgatcgacgacgacacgtacggcaatctgttgcagaatgacctgcggcatcccggacggacggtccgcgagggcgaccgcttcggctacgattatgcgctgacgctgcgcggggctgcgctccgcttgcaggccgattaccgctccgaccgtttccgggccgatctttcggtcgtgctggggagcgatgccgtcagccgccggggctattacgagaaggaactttttcccggcgggcagtcctacggcccttcgcgcgtcatgcggttcacgccctacacgctcaaggccgctgcgggctgggccttctccccgcgccgctatatcgaaatcgccgccgcggccgccgcccggacccctcgggccggggaccttttctttcagccgctctataacaaccgtacggtcgacaaccccgtgcccgaacgcatctacgccgccgaactcaactgccgcctgacgggacccgtcgtcgattttcaggcggcgttcttcgctgccatgacgctcgacggcatcgagacacggacgtattacgacgacatggcctcggtctactgcgacatggctgtgacgggcgttgggcgcatgtcctgcggcgcggaggccgcggccgacatccggctgtcctaccgctggctgctgtcgctggccgcttcggccggacgctacgaatacattcgcgatccgcgcgtcacggtgctctccgacgtggataactcggccgtcgacgtgcaggccgtgagccgtatgggcggctgcgagacgggcggcgccccgcagctgaccgctctggcggagatcgcctggttcggcccgaaagggtggggatgccgcgcttcggcaggatatgccgggcggcgttacgtcgaaccgatgcccctgcgccgcaccgaccgcatcgcgggtcagggcggtatcacacgggagtttttcgacgccttcacccggcaggagcggctgccggacgccttcacgctcgatgccgcgctgttcaagtcgttccggttcgaacgttcgcggctcaccgcgtcgctgatgctgcgcaacctgacgggcgaagccgatacggtctatggcggctacgagtcgctgcgcgtgcgccgcatccgcccgggcgacgacacgctctacgcgccccacgcctcgcgctgcacctatgcgtggccccgttcgttctatcttacaatctcttaccggttttgatccgcacgtaaaaaaacgtccggattttttggatttccgcgttaaattcgtattttggagaggcaaaaaccttaaaaacttccagatccatgattatcggtattccaaaagagatcaagaacaacgagaatcgcgttgctcttacccccgcaggcgcccgggagcttgtcaaacggggacacaaagtttatgtgcaggctacggccggtgtgaacagcggatttgccgatgatgcctacacggccgtcggggcggagatgcttccctcgatcgaggaggtctacgcccgggcggaaatgatcgtcaaggtcaaggaaccggtggctcccgagtacaaactcatccgcagggaccagctggttttcaccttcttccacttcgccagcagcgaacccctcacccgtgcgatggtcgacagcggggcggtctgctgtgcctatgagaccgtcgagcgcgccgaccgttcgctgccgctgctgatcccgatgtcggaggtcgcggggcgcatggccgcgcaggagggacgctatttcctcgaaaaaccccgcggcggcaagggcgtgctgctgggcggcgtgccgggcgtgaagcccgccaaggtcttcgtcatcggtgcgggcgttgtcggaacggctgcggcgcgcaccgctgccggaacgggagccgacgtgacgatctgcgacatttcgctccagcggctgacctatctggccgacgtgatgccccgcaacgtcaagacgctgatgtcttccgaatacaacatccgcgaggagctgaagcatgccgacctggtggtcggttcggtgctgattccgggagccaaggccccgaagctcgtcacgcgcgacatgctccgggagatggagccgggaacggtgatggtcgacgtggccatcgaccagggcggctgtttcgagacttcgcgccccaccacgcacgaggacccggtctattacgtcgacggcatcctgcactactgcgtggccaacattccgggcgccgtgccccgcacctcgaccctcgcgcttacgaacgcgacgcttccctacaccatccagcttgccgacaagggctggcggcgcgccgcacaggagaatcccgagctggcgctggggctgaacatcatcggcggcagggtggtctgcaaacccgtggccgacgcctgggggctgccttacgaaccgttggtgctgtaacctgccggggcggtaatccgcaggcgttgtaacctgccggcctgttttgcggcggcctccctgtccatccgggacggggaggccgccggtgtgtaattatccgactttttggacgatttgtttttgaaattattaaataattcatatatttgcaagagagcaaggcagttacgtcggtcattccggtttcattccggttggaatgcgtcgctaaaagcgtcgaatcttcaagtccggcgactgtttttgttacggatcgtaagcaatacagaaagtcagggtggcgtttgccgcacggaaagcgtggggcggcgtcattaagttttattcgataaagaggttagtatgagtgagagattgtacattttcgacaccacgctgcgcgacggtgagcaggtccccggttgtcagttgaacaccaccgaaaaaattgaagtcgccaagctgctcgaaagcctcggcgtagacgtcatcgaggcgggatttcccatctccagccccggtgatttcaactccgtgctggagatttccaaggccgtttccgagccgacgatctgcgcgctgacccgcgccgtgaagaaggacatcgacgttgcggccgatgcgctgcggctggccaggcgcaagcgtatccatacgggcatcggcgtttcgccgcagcatatctacgacaaactgcgttccacgcccgagaagatcgtcgaatctgccgtcgaggcggtgaaatatgccaaacgctacgtcgaggatgtggagttctatgccgaggacgccgggcgcgccgacgtcgagtacctcgcccgcgtggtcgaggcggtcatccgggccggcgcgacggtggtcaatatccccgacacgacgggctactgtcttccgaacgaatacggcgcgaagatcaaatacctcgtggacaacgttcccaacatcgaccgggcgatcatttcgacccactgccacaacgatctgggcatggctacggccaatacgctgagcggcatcctgaacggcgcacggcaggccgaggtcacgatcaacggcatcggcgaacgggccggcaacacctcgctcgaagaggtggtgatgacgctccgctgccacaaggacgtggccgtcgacacgaacatcaattcgcgcctgatcaccaaggcctcgcacctggtgtcgagcctgatgaacatgcccgtgcagcccaacaaggccatcgtgggccgcaacgccttcgcccattcgtcgggcatccatcaggacggcgtgctcaagcagcgtcagacctacgagatcatcgacccgcaggacatcgggctgaacgagtcggtcatcgccctcacggcccgcagcgggcgcgcggccctcgtgcaccggctcgaactgctgggctacgacctcacgcaggaggaattggacgccacgtacgagaaattcctcgccctggccgaccggaagaaggagattcacgactacgacctgttgtacctcgtgggcgacatcgaccgcatgaagcagcagtccatttcgttgaaattcatgcaggtgaccaccgggacgctggttccgacggctaccgtggtgctgaaattcggcgaccacgaacgcatgtccaccgccacgggcaacggtccggtcgacgcggcggtctcggccatcaagaaactgatcaacgagaaggtggtgcttgcggagttcctgatgcaggccatcacgcgcggttcgaacgacgtgggccgcgtgcatgtgcaggtcgagtgcggcagccgcacggtccacggattcggcgcgcacaccgacaccacgcgggcttcgatcgaggcgttcctcgacgcgctgcgcgcactcaacgtaaccgaaaaaatcgaggaggaggattgatatgggacgaacgcttctggacaagatatgggacgcgcacacggtgcgtgtcgaggacggcggccgctgcgtgctctacatcgaccggcagtatatccacgaggtgacgtcgcccgtggctttcgcggggatcgaacgccgcggcttcggcgtcgcgcgtccggcgcagatcacggccacggccgaccataacatcccgaccgtcgaccagcaccttccgatcggggagccggagtcgcggcggcaggtcgagacgctggccgagaactgcgcccgccacggcatcgagcacttcggcgtgggacaccccaggcagggcatcgtgcacatcatcggccccgagctgggattcacccagccgggcatgacgatcgtctgcggcgacagccacacttcgacccacggagctttgggcgccgtggcgttcggcgtggggacttcggaggtcgaaatggtcttcgccagccagtgcatcctccagaccaaaccccgcacgatgcgcattacggtcgacggcgcgctgcgtccgggcgtcgaggccaaggatgtcatcctctatatcatctcgaaactcaccgcttcgggcggcacgggccatttcatcgagtttgccggcagcacgatccgttcgctctcgatggagggccgcatgacggtctgcaacatgagcatcgagtgcggcgcgcgcggcggcatgatcgcccccgacgagaagaccttcgaatacctccggggccgcgaacgcgctccgcagggagccgcctacgacgaggctgtggcccgctggcgggaactttacagcgatcccgacgcggttttcgacagggagtaccgcttcgacgccgcggacatcgccccgatgatcacctacggaaccaatcccggaatggggatggccgtcgacgggacgattcccgccgacgccgatcccaaggcgttggagtacatgggtttcagacccggggagcggatgttgggcaaagcggtcgactacgtgttcgtcggcagttgcaccaacggccgcatcgaggacctgcgccgtttcgcccgtctggtcgaaggccgccgcaaggcggacaacatcaccgcatggatcgttcccggctcgaagggcgtcgaggccgccgcgcgggccgagggactggaccgcatcctcgccgcagcgggtttcgaactccgccagccgggctgttcggcgtgcctggcgatgaacgccgacaagattccggcgggtaaatacagcgtttcgacctcgaaccgcaatttcgagggccggcagggtcccggcgcccgtacgatgctgtcgggtgtggccgttgccgccgccgccgcggtgacgggcgtgatttccgatccgcgcgaagtgttcgatatgtaaaagattatcattatgtccatacccaaattcgtaaccttcacctcgggggccgttcccgtcgaggtggaaaacatagataccgaccagatcatcccggcgcgctttctgaaagccaccgaacgcaagggcttcggcgacaaccttttccgcgactggcgctacgacgccgcggggcagcggatcgcttcgttccctttgaacgatccccgctacgaggggcgaatcctcgtcgccgggcgcaatttcggctgcggaagttcgcgcgagcatgccgcctgggccatcgccgactacggtttccgcgtcgtggtgtcgagcttcttcgccgacatcttccgcaacaacgccctgaataacggcctgctgccgatccgtgtgagcgaggagtttctgaaagctgttttcggcgagatccggcgcgacccgaaggcgcagttcaccgtcgatctgggcaaccagacgctgaccatcgtgtcggacgggcgcagcgagggtttcgagatcgacgcctacaagaaacgctgtctcgaaaacggctacgacgacgtggactacctgcgcagtatcgccgaccggatcgaggccttcgaagccgcccgcaaatagcctgcgccgatgtttcccccggttgaaatcatggacaccacgctgcgcgacggcgagcagacctcgggcgtctccttcaacgcccgtgaaaaactctccatcgcccggctgttgctggaggaactgcacgtaagccgcatcgagatcgcctcggcgcgggtctcgcagggcgaacagcaggccgtgcgcgccatcgccgaatgggctgccgccaagggctatgccgaccgtgtggaagcgctgggattcatcgacggcggggtgtcgctcgactggctcgggaccgccggatgccgcgtggtcaacctgctggccaaaggttcgcggaaacattgcgaggggcagctgcgccgcacgcccgaacggcatctggaggatgtgcgcgccgagatccttgcggccgtcgaccgcgggatgaaggtgaacctctaccttgaggattggtccaacggcatgcgccgttcgcccgactacgtctacgcgatgctcgacggactggccgacgctcccgtcagccggttcatgtgccccgatacgctgggcgtcctcgacccctacgacaccgaacgtttctgccgcgacctggtggagcgttatccgtcgctgcatttcgatttccacgcccacaacgactacgacctcgccgtggccaacaccgccgccgccgtgcgtgcgggtttccacggcgttcacgtcaccgtgaacgggctgggtgagcgggccggcaacgcgccgctgtcgagcgcggtggccgtgctgcacgaccgcctgggccgcacgacggggatcgacgaaacgaagatcaaccgcgtcagccgcacggtcgagagctatacgggcatccgcattcccgccaaccgaccgatcgtcggcgcgagcgtcttcacgcagtgcgcgggcatccacgccgacggcgacagcaagaacaacctctacttcaacgaactgcttcccgagcgtttcgggcgcgtccgcgaatacgccctgggcaaaacctcgggcaaggccaatgtcttgaaaaacctcgaagcgctgggcatcgacctcgacgaggccgcgatgcgcaaggtgaccgaacgggtggtcgagttgagcgacaagaaggagcaggtgacggccgaggacctgccgtatatcatcgccgacgtgctgcgctacgacccggtcgacaccccggtccggattctcaattacagcctctcgctggcgcaggggatgcaccccgtcgcgacgctccggatcgagattcacggctgcgcgtacgagcggacctcggcgggcgacggccagtacgacgccttcatgcgtgccctgcggcaaatctaccgcgaacagctcgggcgcgagtttccgatgctgcgcgactataccgtttcgattccgcccggaggccgcaccgacgccttcgtgcagacgatcatcacctgggagatggacggccgcgagttcaagacccgcgggctggacgccgaccagacggaggctgccatcaaggcgactgtcaaaatgttgaatatcattgaaataaactataacgacaatggatgttaaaatcgctcttttagccggcgacggcatcggtcccgagatcgtcgccgaagccacgaaagtgttggaccgcgtggcggaaaaattcggacacaagatcgaataccgtcccgcattggtgggcgccgcggccatcgacgccgtgggcgacccctatcccgacgagacgcacgccgtctgtcttgcggcggacgccgtgctgttcggagccatcggggaccccaaatacgacaacgaccccacggcgaaggtgcggcccgagcaggggctgctgcggatgcgcaagtcgctggggctgttcgccaacctgcgccccgtggcgctgttcgacgccctggccgaccgttcgccgctccgggcggaggtggtccgcggcacggatttcatctgcgtgcgcgaactcacgggcggcatctacttcggccgtccgcagggccgcgacgaggagggcgcgcgcgccttcgacacctgcacctacacggtctcggagatcgaacgggtcctgcacgtggcgtttcggctggccgtgtcgcgccgccgcaaactgacggtcgtcgacaaggccaacgtgctggaaacctcgcgtctgtggcgtgaaacggcccagcgggtagcccgggagtatcccgaggtggcggtggactatatgttcgtggacaacgctgccatgcagatcatccgccaaccggcttatttcgatgtcatcgtcaccgaaaacatgttcggcgacatcctcaccgacgaggccagcgtcatcagcggttcgctgggcatgctctcctcggcgagcgtgggggccgaagtggcccttttcgagccgatccacggctcctatccgcaggccgcgggaaagaacatcgccaacccgatggccacgattctttcggccgcgatgcttctggagcacctgggtctcgatgccgagggcagggctgtgcggcgtgccgtcgatcgggcgctggccgaaggagtcgtcaccgaggaccttgcagcgccgggcgaaaaggcccgttcgacctccgaggtgggggattacgtcgcttcgcagatttaatcccgttattccgaattgccggcagaccgttttttcgcggtctgccttttttgggtgtcgtaacgacacttttatttttgttgcggcgttttaccgaactgcatgcgaatcaattttgttctcgtccgacttttatgtacctttgtcgcttcaagaacaatgaatgacatggcaggttccaatttcgtagattacgtaaagatattcgcccgctcggggcacggcggcggcggctcgacgcattttcgccgcgaaaaattcgtggctttcggcggtcccgacggcggtgacggcggcaagggcgggagcatcgtcctgcaaggcgacaagcagtactggacgctcatccacctcaaataccagcgtcaccagttcgccgaggacggcgagcacggctccggggcgcgctcctcgggcaaggacgcccgcgacatcgtgatcccggttccgctgggcacggtagccaagcgcgttttcgagaacgaggacgggactgcgaccaccgaaacggtgggcgaggtgacggccgacggcgagcggctcgtgctgctccggggcggccggggcggtctgggcaactggcatttcaagagcgccactaatcagacgccgcgctacgcccagccgggcgaggagggtgaggaaggcacgttcatcctcgaactgaaggtgctggccgacgtggggctggtgggcttccccaatgcgggcaagtctacgctgctctcggtcgtttcggccgcgaagcccaagatcgccgattacgccttcacgacgctggagccaaacctcggtatcgtcgaggtccgcgaccacaagtcgttcgtcatggccgacattccgggcatcatcgagggtgcgcacgagggccgcggtctcggaacccgtttcctgcgccatatcgagcgcaattcggtgctgttgttcctgattcccgccgacagcgacgacatccgccgcgactacgacgttctgctgggcgaactgacgcagtacaatcccgaactgctggacaaggagcgcctgctggccgtcaccaagtgcgacatgctcgacgaggacctgatcgccgagatgcgcggccacctgcccgaaggcgtgccgtcggtcttcatctcgtcggtctcggggctgaacatcccgcggctcaaggatatgctgtgggaggcgttgcagcggtaacccccgcccgcgttgtccgcgttgtccgcgccggacgtccggcggttgggcgtgttgctgcggaatgcgctgccgtgccggaaaactccgcttcgcggttggtgacgcgcagggtgtatttcccggcgaaatagtcgatgattccatacaaggagcctgtgccctggggcagaggctcctttgcgtagacgcaggtcgcggcggtccgcacggtgaaggttcggccccgggtgtcgacgatctcgcgctcggtggcgacggcgcggcccgtctccgggtcggtgtcgcaccaggttttcccggcgtcggcgaaacgcacgtcgtcgaaacggacgcgtgtgtcgatgtgccgggccgagacggcgtcgaacgtaaggagctgtgcggagggtgtctcgccgccgggcggttcggtgcggatgtaccgcgccagctcttcgcgcggaatgcaccctgcgccgccgtcgccgggtgtcgttcccagctggattttcccgccgtagtcgcacagcgtaaggccgttgcagcgtacggtcgccacgatgccgaacggatagaggtctgccagcggggagccttccgcggcgatcgagatgccgcccgaggcgtcttcgacgacgatcgtcctgtgaaattcgccgtagaggtcattggccgtgacgaatccgcggatggtgatgtcctgcgctatcgcgacgctgctcttcccgtcgcagagcgatttgaggtaggcgaccgaattctgcggctccggaggacggaccgtgaattcgggctgcgtggcccggtcgcatccggccggcagcgtcagcaggaccggcagcgtcagcaggctaatgcgtgcagtcgttctcatcgcgcagtttgaggatgtaacgcccgtcgcccgcggcgtcgtactggagaatgcccgtcagcgagaccgtgccggcaggcacttcggcgtcggcgaaacgggcgtatcggcggacgtaggtgtagacggcgttgccgtcggcgtcggtgaagcgtttgtagcccgcccaggttgccgccgaaaggtcttcgggggtgtagcgcacgccgtcgatgcggacgagcgtgccgcagcggctttccgtaagcgcgggaatggcaagcggggcaggggagggcgcagccagggcttcgccgctgcggaccagcacggagccgagcgccgcccgggagccgatgtagtccgttgcgtagccgcttccggcggcgggcggacgtcccgcctgcaacaccccgcggctttcggcgatggcgagtccccggagcgaaagcgttacgcggcttcctatggggaagccgttgtgcagatggtcgataccggccatcacttcaagtcccgcttcagcgtcgcagatgcagagcgtgcggtagaaattctccgcgcggtcgcaactcgcgaccctccccgtgacgacgatgtcgcccgtaacggtgaagggcgtgcccgcatagcggtcgcgcagcgcggcgatggtctccgtcgcgggtttcccctcgccgtcgtcgtccggttccccgaaccgggagtcgtagcacccggtcagcaggagcgcggcgacggcgccgaaaaaaggtatgggacggaagtgaaacatatttttacgcaatgcggtgattcatacggaccccggccggtttgccgttaagcccttccccgggagaggggcggaccggtgaacgacgccggaggcggcgataacgaccggaccgaagcgggatgcggcgtgtcgcgcggaagcgtatccagcaatgttattgttcgatacgcgaatctttcagtcccaggaagtagaggatgccgtccagcccgatggtcgagatcgactgtcgggccgtggcctttaccttgggtttggcgtggaaggcgatgcccaggcccgcgaggttgagcatcggcaggtcgttggcgccgtcgccgacggccaccgactgggcgatgttgatctcctcgaactggcacagcagccgcagcagttcagccttgcggcgtccgtcgaccacctcgccgacatagcgtcccgtgaggcgtccgtcctcgatctccaattcgttggcgtagacatagtcgaagccgtatttctgccggaggtagttgccgaaataggtgaatccgccggagaggatcgccgttttgtaacccacgcgtttgagaatggtcatcatgcgctccagcccctcggtgatcggcaggctgcgggcgatctcctccatgaccgagacgtccagtcccttgagcagcgcgaccctctgcgaaaagctttcgcggaaatcaatctcgccgcgcatggcgctggccgtgatttcgcgcaccttgtcacccacgcccgcgcgctcggccagttcgtcgatcacctcggtctcgatcagcgtcgagtccatgtcgaagcagatcaggcggcggctgcggcggtagatgtcgtccttctggaacgagacgtcgagaccgatctccgagaggttcataaatccctcctgcatcgtgctgcgttcctggtcggtgagcgatccgcgcaccgagagctcgatgcacgacttggcggcgcggtcgtcctcgcagaggggcatgcggcccgtgaggcgtttgatggcgtcgatgttcagcccgtgctcggccacgaccttcgtcacctcggcgatgtggcgtgccgtgacggtgcggcccagcagggtgatgatgtagcggtttttgccctgacggcccacccagtcgttgtagcgttcctcggagatgggcgtgaaacggatcatcacgcccagttccgacgccttgaacaacagctccttcataatgcttcccgacttgtcggccgtggtcttgatcaggatgccgagcgtcagcgactggtggatgttggcctgtccgatgtcgaggatgaaggcgtcgtagcgtgcgaggatctcggtgagcgacgaggtcatgcccggtttgtcttcacccgaaatgttgatctggataatttcaacgttgttctgcatcgtataatgtatggtgttttccggcgctttctgcaaaaagcgcagacaaagttaataaagttctcttttttttggctatttttgcctcacaaacttaaaaaacggaattatgtggacatttttagcggccgaagaacctgcctcgctgatcgtgccggacagtgtgcagaaagcgaatctggccgaagcggtcaataagatcgtgaacatggatttcagcactttgttcggctcgctgattcgtgaatcgctctggattcttgtcaaggttctcattgcgctagccatctatttcatcggacgctggctcgtgcgccgcttcctgcggctgatcgacgtggccatgcagcaccgcaatgtcgacatttcgctgcgttcgttcacgcgtaataccgtcagcgcgttcttcacgctgctgctcatcctgatcgtcgtgtcgacgctgggcgtcaacgtgacatcgctcatcgccgtcgcgtcggccgccacgctggccatcggtatggctttgagcggcacggcccagaactttgccggcggggtgatgatcctgctgatgaaaccctaccgcatcggcgactacatctcggcgcagggacagtcgggaaccgtgcgcgacatcaagctcttctcgacggtgatcgccacggccgacaaccagacgatctacattcccaacaactcgatcgcgacggccatcatcgacaactattccacctccgagacgcgccgcgtggactggaccgtgggcatctcctacggcgacgacgtggatgtggcccgcaaggccgtcctttcgatgctggccgccgatccgcgcgtcctgcccgatcccgccccggtggtgtgggtcgctgcgctggccgacagttcggtgaacctctcgatccgcgcatgggtcaagaacgctgactactggaacgtctttttcgagcataacgagcagttctacaaggagctgccgaaggccggcatcaacttcccgttcccgcagatggacgtgcacctgaccaaagagtagggtatgaaaacgcaccttttcaccgttcttgcggcaatgagcctttcggcctgcaatcctgaccggggacccgagtatacgaccccggcggaattcggcgaggtgaccgtgtcgccgcagaccatggccttcgattcggaggtccgggtgaaggtgtccgtttcgtgcccctacgggctgcgcaacgtctgcattctctacatgctcgacggcgacgaatccgacgtgaggaccgtcgcgaagaccgagccgccagccgacgtcacctcgttcgattacgagggagtcattccccggcagagagccggccggaaagtgactttccggatacgtgccatcacggcatacaatgtgccctcctatacgcagcttcgggaatatacggttcccgacgaagaggaggaagaatccgaacaacccatttaaacaacgaaatagcaattttatggaactgaaagagattctggccatttcgggccagcccggactttataaattcgtggcgcagtccgtgcgcggcgtgatcgtcgagtcgctgctcgacggacggcgcatgaatgcctcggcgaatgccaaggtgagcgccctttcggagatttcgatgttcaccgaaggcgaggacattgcgctggccgacgttttcacccggatctacgcccacacgggcggcaaggaggcgatcagccccaaggagtcgcccgagaagctgaaagccgcgtttgccgaggtgcttcccgagtacgaccgcgaccgggtgcatgtttcggacatcaagaagtgtttcgcgtggtacaacacgctggtcggggcgggattcacggagttcaaacttccggccgagaacgaatagcgaaaaatatcccggcccgtgccgggacgaaccgaaagccgctgcggctttcataaagacctgtcgttatggagaggaaaacgaaagtgctggcactggttgcccacgacaacatgaaacgcgacctggcggagtgggtcgactggaacagccgcaagttgagccgccaccatttggtatgtacgggtacgaccggcaagatggtcgaaaagaccctgcgcgaccaccgggaggagcacgaggacgagacggaggagaaacccgagctgaaaatcacgctgctcaagtcgggtccgctgggcggcgaccagcagctggggtcgctcatcgccgacggaaagatcaatgcgctgattttcttctgggacccgatgtcggcccagccgcacgacgtcgacgtgaaggcgctgctgcgtctggcgacgctttacaacgtcccgacggccatcaaccgttcgtcggccgatttcctgatctcctcgccgctgtacgaggacgacggctacgaacccgtcgtgaaggattacaaggcctatgtcgagcgggtgctgaaataggcgatggattgaaaagggaacgggcgtgaatttcacgcccgttccctttttcgttattaagtgtacgcagaggttgtttttgcaggaatccggagcgtttactccatgtccagcggcatggattcgatgaccgctttgttggcggccttgagccgttcgggaagcaccttcatcaccttgcggtcgtaggtgaacagaccgttcacttcgccctccacgtcggtggtctgggtgtagacggcgcccgagaagcccagacgcacgtatttgatcaggcttttggcgtatttctcatactctgccgtcacctcctccggggtcttgaactgcacgtagccccagttgcgcttgttccaccagaggtgtccctccatgggcagcccgatgccgccgtattcgcccagcacgttcacgcgctgcggatcgaagagtttcatggcgggacccgggtagttgtgcaggtcgagcatgtggccgcagggacggtggttgccgccgctggcggggttgaccagacgcgagggatcgtactccatggtccagttcacgatgcgctcggtgtcgaactggccccatgcctcgttgaagggaacccataccacgacgctcggggaagacatgcataaatccatgatctccttccactctttgctgaagttgtccttcgactcctgcgtgcggttcttgtccgtaccgccgttgtaggtgtgcatttcccacttgttgcccatgtctcccgagggcatgtcctgccatacgagaatgccttcgcggtcgcagtggtagtaccagcgcgccggctcgaccttcacgtgcttgcggatcatgttgtaacccagctccttggtcttcagaatgtcgaacagcagcgcttcgtcggtcggtgcggtgaaaagtccgtcgggccaccaaccctggtcgagcggaccgaagtggaagagcggtttgtcgttgagcgtcatgcggaggatgccgcccttgtcgcgcttggttccgatcttgcgcatggcggtgtacgaatcgaccttgtcgacggttttcccgccctgcctgagcgacacttccatgtcgtagaggaacggcgagtcggggctccagagtttcggctcggcgatgcccagacgcagcgggtttccgggaagtcccgtcgccgaagccacgagcttgcccttgtcgaggatcttcacctccaccagatcgcccgtcgtgcagttttcggccgccacggttacggcgatgttcttctggtccaggttgggaatggccttgatgcccgagatgtggctcttcgccaccggttcgatccacacggtctgccagatgccgctgaccggcgtgtaccagatgccgttggggttcagcacttgctttccgcggggctggtatcccttgtccgtgccgtcgaacacgcgtacgaccagcttctgctcgcctttggccttgagatagggggtgatgtcgagcgaaaagggcgtgaagccgcccgtgtgcgagcctgcaaggatgtcgttcacgaatacgtcggctttccagtccaccgcgccgaagttcagcagcacgttgctgcctttccaggcggcgggcacgctgaacgtgcggcggtaccagagttcatccttctcggtgaggcccttctgcacgcccgacagcgaggattcgacagcgaaggggacgaggatctttccgtccatcgttttcggttccatggcgccgacgggtttgatggcatagtcccacaggccgttgagattcacccactgcgagcgtaccatctgcggacgcgggtattcgggaagcacgttggccgggtcgaccttttcggcccatggcgtcttgattttgtcgcccacgggtttccactgggcaaaggtgcacagcatgctcagcgctgccacggttgtcagaattgtttttttcattactgattgataaaaggattgaatatagtgtttactgtctcttcttcttgaactgtccggggtaaggctctaccatgcagcgctttgcccaggcttcatacgctttggccatcgcttcgacctttgcgggggcctgctccggattttcgagcacgtatatctgatggttgcccgtattgccgtcgtcggcgctcaaatagatataccatcaggttcgcgatccggcgcagcgacatggcgtttacgggagctttcatggttgggttggttttaagatcctgatttacgaatacaaatttcgtaaattaaaattttttacctgccatattttgatcagaaaaaagcaagatttagtcaaaatgccccgcaggggtccggttggcgaaaaattgtcgtcgattggtcaaatattggtgccccggaacggctgatgtatttatatttgtatgccaatcgaaatcgtgcattattttatgctattcttcaaacgcccggctttcggccgaatctacgccttcgaggtggacggctacgggaaccgcaccggcctgctcaacagcattacggtcgagtagggaccggtatgattccgatgaaaaagcggggccgcacacattgcggccccgctttttcacaggttgtgcgacagcggtgccggaaccgcttcgctcaaatcgtagccgccccagcggcaggcgatctcgtcgagcgtggcgaacagctcggcggtgtcgagcgatgtcacgagtttcagccgtgtggacttgaagtcgggcagccccttgaaatagttggtcatgtgacgccgcatttcgaggattccgacatggtcacccttgatttcgagcgatttctgtaaatgttccttcgcgatggccacgcgttccgcgaccgacggctgcggcagcgcttcgcccgtcgagaggtagtgcttcacttcgcggaatatccacggccggccgtaggtcgcccggccgatcatcacgccgtccacgccgtagcggtcgaacatctcgcgggctttcggacctgaatcgacgtcgccgttgccgatgatcggaatgcgtatctgcgggttgttcttcaccttgccgatcagcgtccagtcggcctcgccgcggtacatctgcgcccgcgtgcgcccgtgaatggtgagggccgcaatgccgacatcctgcaaccgcagggctatctcttcgatgtttttcgactcctcgtcccatccgaggcgggttttcaccgtcacgggcttcttcaccgccgcgacgatccggcgcgtcatctcgaccatcagcggcacgtcgcgcatcatccccgacccggctccgcggccggcgatcttcttcaccgggcagccgaaattgatgtcgatcacgtcgggaccggccgcctcggccatgcgcgccgcctcgaccatcgggtcgatcaggtggccgtatatctgaatgcccacggggcgttccgtgtcgtcgatttcgagtttcttgagcgatttcgccgcgtcgcggatcagcccgtccgacgagatgaactcggtgtagaccatgtcggcgccgaagcgtttgcacatgtagcggaacgacgggtcggtcacgtcctccatcggagcgagcagcagggcgcgttcgcccagttctatatttgctattttcatggctgttgtttctggctgacgaggattttgtcgatgcgcgcgccgtccatgtccacgatttcgaacgtgaagccgttccattccagtttctcgcccgtggcgggaatgtgggccagttggtcgaggatcaggccgctgacggtgttgtaggcgttgcagggcagggcgttttccagaccgaaccagtcgagaaagtcgtagaaagggcattgcccgtcgaccagacagctgccgtcttcgcgccggacgatgtccggttcctcgcgcgggtcgggcagttcgccgaccagggcttcgaaaatgtcgcgcagggtgatgatgccgcgcgtcacgccgaattcgtcgcagatgatgccgtagcccagctgctccgtgcgcagctgttcgagggcgttgtagacctcgaacccttcgtggaagaatttcgccggagcgaccagcctgcgcaggtcgaatccctcgtcgcccaggtgcaggaagaggtctttgaggcagaccacgcccagcagtttgtcgagacttccctcgccgacggggtagcggttgtggggcgctcgggccaccgtctcgcggatctgcgctgcggacgccgccgcgtcgatccatgccagttcgctgcggtgggtcatgatcgactccacggtgcggtcgcccagcgagaagacgcggcccatgatctgctgttcgaccgcctgcacctcgccgtcctcggcgccttcctggatgatcgaacggatttccgcctcggtgaccttgctctcggcccgttgcaggcctagcaggcgggcgacgcccgccgtgcttctggagagcagccacacgaagggcgacgccgcgaccgaaagcagccgcatcggctgcgcaacgatttttgcggcccgctcggcggcgttcatgccgatgcgtttgggaaccagttcgccgaagatgatcgtgaggtaggtgaccgcgatgacgatagtgacctgcgccgtgacggtcgccgtgcgcagcggaatgcccagtcgggccagctctccgccgaatttcgccgccagcgtgtcgccggagtaaatacccgtgagaatgccgatcagggtgatgccgatctgtacggtcgagaggaaccggtcggggtctttggccagtttcagggcctggcgggcgcctgcgctgccttgccgggcctgcatctccagattcgagcggcgggccgatatgagcgcgatctccgacatggcgaacagcccgttgagcaggatcagcagcagaatgacgagaatttccatggaatgtcttgtcggtttgtgtcgcaaagataatggatgtcgggctaaaaccaaagaatatggtcccgggggaattgcttattcgctgaaaaacgctaaatttgcaggcaaaatctattggatatgaatatcgaaacctttatttcggatgcggtccgccggtcggtggaggcgctttacggtgagcttggcgacgagcagttgcagattcagaagacccgcagggagttcgagggcgactataccctcgtaacctttccgctgctccggcgaagccgcaagtcgcccgaagccaccgcgaccgaaatcggcgaatacatggcggccaacgtccccgagatcgcgtcgttcaacgtgatcaaaggtttcctcaacctttcgctcgacagtgcgttctgggcggcccgcttcgccgaggtcgccgccgacgaacgtttcgggcaggctcccgcgacgggccgtaccgtgatggtcgagtattcgtcgcccaacaccaacaagccgctccatctggggcatatccgcaacaacctgctgggttactccgtggcgcagattctcaaggccaacggccatacggtcatcaaggccaatctggtgaacgaccgcggcatccacatctgcaagtcgatgctggcgtggaagctctacggaaacggcgaaaccccggcatcgtcggggatgaagggcgatcacctcgtgggcaagtactacgtggagttcgacaaacactacaaggcgcagatcagggagctggtcgcgcagggacagccggaggacgaggccaagaaaaacgccccgatcatgctccaggcgcaggagatgctgcgcaagtgggaggcccgggaccccgaggtgtactcgctctgggagacgatgaacggctgggtttacgagggcttcgacgtgacctacaaggcgttgggcgtcgatttcgacaaggtctattacgagtcgcagacctacctgctgggcaagtcgctcgtcgaggaggggcttaaaaagggtgtcttctaccgccgttccgacaattcggtgtggatcgacctcacggccgacggactggacgagaaactgctgctgcgcggcgacggcacgtcggtctacatgacgcaggacctcggcacggctttccgccgcttcgaggacaataggctcgacgacatgatctacgtcgtgggcaacgagcagaactaccacttccaggtgctgaaactggtgctcaagaaactgggctacgccgactggagcgatcatatcacccacctctcctacggcatggtggagcttcccgagggcaagatgaagtcgcgcgagggtacggtggtcgacgccgacgacctgatcgaaggcatggtctcgacggcccgcgagatgtcggccgagctgggcaagctcgacggatgctcggaggaggaggccaatgccgtttcgacgatggtcgggctgggtgcgctcaagtactttatattaaaggtcgatcccaagaaaacgatgctgttcgatccccgcgagtcgatcgacttcaacggcaatacgggtcctttcatccagtacacccatgcgcgcatccgctcggtgcttcgcaaggccgccgaggcgggcatcgacttcggaggagccgccacggcggattacctgcgcgaggagatcgacctggtgaagtcgctgacggagtatccgtcggtggtgaagtccgcgggcgagaacttcgcgccgtcggtcgtcggggcctatgtctacgagctggccaagcagttcaatggctattaccacgaccattcgatcctcaaggaggagaacgccggggtgcgcacgatgcgtctccagctggcgcagcaggtcgcccgcgtcatcaaggagggcatgaaactgctgggcatcgacgtccccgaacgcatgtaacgcattctgtgataatgaaaaacggaggtttcgccgaaacctccgttttttcgtgccgttagcgtggtacgaatcttgcgagagacgaggacgttaactaacactattttagcgtgaaaacatttgcatcaactttcgctctttctctcgcgttgtgtgccgctgccggagcgacggcccaaaccaagagtgcggttccggctcctgcggccgataccgtattgctgtcggagactgccgacggagactacatcgttcgcaggttcatcgtcaaaagccgcggcgacgccgactattcgattcgctaccagatcaatctggcgacgctcaatgccgcgctcaacggcaatccgcaggagctggacggactcaacgcctttgtggacaaccttgtgaaggatacgctccggcaggtctgcgccgtgacgatcacgggctattcttctcccgacggtccgctgaagttcaacgaagcgctggctgccaagcgggccggcgatttcaaggcgtatgtcgacaggaagtacgatttctcgaaaaagtacaaggtgacggtgaattccgtcgccgaggattgggagacgtgccgcgcgctggtcgcgcagtcgtcgatgcccgaccggcagtccgtgctgaacgtcatcgacggcaagcagtcgtccgatcagaaagaattggcgctcaagaagatgccggctgcgtggagctacctgaaaaagaacgttctgccgaaactgcgccgtgtcgaactgacgatcggctacggtgcgggcagcatcgtcgagcagcgcaccatgatccccaaacccaaaccggctccgcagccgcagcccgcgcaacccgctgaaccgtatgtcgttgtcgacgagcaggtgaacggaatcatcgtcgagatgcccgacaggcacgaatacaagaaggaggtgcgcgaggagtcccgggaggtgaagaaggaggcgagggccgccgagcggctcgccaaaaaagaggcccgcgaagcgcagaagatagtccgccagcaggagaaggctgccaaaaagatcgctaaaaaggaggccaaggccgccaagaaagccgagaaggccgccaaaaagacctacaaggagctcgaaaaaatgtaatgaaaaaggattccggatttccggaatctttttttgtccgccgcccgcccgggaaataattcccggggccgcagtccgaaaatgtttgataatccgaaacgttttattacctttgtcagagcaaaaattttaaaatcgactgaatatggcaaatttacgaaacctgaagaaggagattgactaccgccttgaggaggttgttttcgactgcgatatggctatctgttttcagccttcgaaagagaaggagattttcgaggtgatgcaggaggccgtcggcgttcgcaacgatctgttcgccaaagcgatgaatcccgccgagccgcacaatccgtcgctcgtccgcaagcactacgctgccctgcgcgccgagatggacgacgttttcggcaaacttttcgaaaagttgagcaagatcaacgagcagaaatagggtagtccctttcgctgaaaaacaacggagcgcctcatgcggggcgctccgttcgttttattcgtggtcgcggcagcagtcgccggggtggtgttccagcacggtgtgggggatgtgcccgtgcgataccagttgaatcgggcagtcgtagttgcgcaactgttcctcggtcagaatgttcgaacggtggcggtggacctgccggttgacgcagacgatctccttcacgacgctggtgatcgtgccgatgtcgtgcgacaccatgacgatcgccatgcgggcgttcagttcatgcagcgtgcggtaaagctccttctcgaatttgttgtccacgaaattcgcgggttcgtccaggatcagcagcttcgggtccgagatcacggcccgggccagcagcgcccgctgcatctgcccgcccgacacctcgccgatggggctgcgggccgtgtcggcgattcccgatgccgcaagcagttccatcgctctggcacggtcctccttcgtgtagcgggagctgaatccgcggcggccctgcaatcccgacagtacgacctcgaggaccgagatcgggaatgcgcggtcgaaatccgaaatctgcggcatgtagccgatcagccgttccttcccgcggaacagctccggggcgagagtcagctctccggtgtgggggacggttcccaggatggcctttacgagcgtcgtttttccgccgccgttgggacctatgacccccaggaaatcgaggtccgcaatctccaggtcgacgtgccggagggcctcgtagccgtcgtatgcgacacttacgtcgcgcagcgttaccagattcattttgccgtgattgaatcggtcattgcgtcgatggcgccgatggcgtcttcgtccagcgggtcgatctccacgtattcggcgtcgatgtcgcgggcgatgatctccacggtcgatgccgggaactggttctggtagaaaatccgccgcacgccgtcctcgcgggcctgtcggataaccgccgtcagctgtttggccgacggttccttgccgtcggcctcgatggccacctgccgcagtccgtaatcgcgtgcgtagtaggtgagtgcgggatggtagacgatgaagtacttcacgccgctccgggcgatcttctccgccgtgcggatgtccagttccttgagcgtgctgcgcagccggttgtagccggcctcgtatttcaccgagtcgggataggcgttgcgaattgcctcgtaggcgtttgcggccatcgtttgcagggctttgggcgaggtccagacgtgggggtctacaccgtgggcatgcccgtggtcgtgtccgtggtggccgtgcgagcaggagcctgcgatcaggtcgataccgcggctcaagttcacgactttcgcctgatccccgactttgcccagcagggtggtttcgaagtcgatcaatcccacgttgaaaatgagctgtgccttgttcagctccacgaactgccggggcgtcggctcgaacgtctcgggacttgctccgggcggcacgagcacctcgattttgaaatcgtcgccgacaatcccctccacgatgctgcgcagcggggggatcgagacgtaaaacgtattctccccggcgggttgttccggcgtgcaggccgcgagcagcagggctgccagtaagtatgccgataatttacgcatggttgacaatcaatgatttgtgatttatacggtagggtagtcccctgtattttgtgcaaaggtagtaaaattacccgtagcggcgggattttgcggcttgttttgtcgtttcggccgaaatgtttatctttggcccccgattaaaatccccgtatgccgataaacaatccgaaagaggtcctcgccctggtggagagggccgcctccgacaagatttcgcttcccgttcgcaaaatattgattttagcgtttttagctggcgcctatatttctatgggaggcttgttttccatcgtgataggatatggctttccgtcgatggctcctgctccgggattgcagcgcctgctctccggacttgtcttcccgctggggcttatgctggtcgttttcgcaggagcggaactctttacgggcaataatgccgtgctgatccccggtgcattgggacgacgttatggatggcgtaaggtgttgttaaattggatgttggtctatgccggaaattttgtcgggtcgctgtttttcgcctgttttctcgtgaaacttcccggcatgctctctgccgaggcgtggcgttcggcggccgtcggcattgccgaggcaaaggtctcgatgccgtggctcacggtgttcctgcggggtgtcggcgccaactggctggtgtgcctggccgtgtggctgggtttgagcgccaacgatgtcgcgggccggctgctgggattgtttttcccgataatgtgttttgtggcaatcggttatgaacacagcgtcgccaatatgtttttcattccgctgggcatgatgcacggtgcatcggtcaccgtgtccgattttctgcttgccaatcttgttcccgcgactttgggcaatatcgccggcggagcggtctttgtcggcggtatctactggtatattaataagtaaaaaacggttgattattaatcaattaatattcgggtaacgaccataatttaacataatgaatatattaattcaattacctttgtactgtaaggatgctttttttatggtcgccggtcggacgattggccggcgggttaaattcattttggattttaagcttcggccggcggcggattatcttcctgtgcgtgcaacattcacaaaaatattccgggcgatggcttttagcgctttgtcggcgtgaaactctcgaaggtaaggtcatcgtacaatattacgatccgccggacagcgacgtctgttcgtgtgccggaaaatggagtcgttgccggcggcgccggattttcggacgttgtcgaagccggctcctgatgcggcgggttgaacggcgtattccgggtcggaccgaacaatccgtcggagatcgacgattcgaccgcagcggccggtgcggattgttcgggttcgctgtcgcgatacatcttgtcggaatcgagcagcagccagtcgggattgattcgcgggaacctccggagaatcttttgtaacaaatcgaagcccggtttgtttcgcccggcgagaatatgggaaattcccgccggattgatttcgagcagttccgcgagctggctcggcttcaatccttcgtttttcatcagatcgagcaatttttccctcatcagcgcaaatttttacaaatataaagttttttcttttgtaaaacaagtaaaatctacatttgtaaaatgttaataagtgtcgacaaagtttacaagtgtaaataagtcgatatggttaaatttgcatgcaatctatttgttaaagcgttattttagataaataacagtaaatatatgatattattgtatttacgtcgtatattgttggtgttgtctgcatgtagctggttattgatgaattagaccgtatgatattaaatcgtttctttaagtaatatttgtaaatagctgattgatggatatatattgctcgatgtttaatattttgatcgcttgttggtcgctctggaattgcagtttattcaaaggatgccggattattacaattgtaactattgacatctttaacaaacagatgtggtttacaaatgtaattacatatggaaatgacgcggacattatgtgtttacatttgtaaatacactaccctattttgtaaaaatgaatgcattttcaagctatttccgaacccttatcagacattttgttaacatctccggatttcggatttattatgttaaataaaaagaggccggatagtgttgataatccactatccggcttaaatacagcttgttgtagatttgtaaacagccttctatttcgagagtttgtcggctatttcgcggaactcttccggcgtcagtttgagcttttcgcggtggaaatccacgtcgttttcgctctgaatggggatcagatgaatgtgtgcatggggcacttcgaggcctaaaacgacgactgctacccttgcacacgctatttcccgcttgattttggctgcgacctctttggcgaaaagcatcatgcctgccagcgttcggtcatcgaggtcgaaaatgtagtccacctcctttttggggacgaccagcgtatggccttttgtcagcggattgatgtcgagaaatgcgtagtagtcttcgttttcggctactttgtacgaggggatctcccctgcgatgatgcgtgaaaaaatagttgccatatctttgtttttaggttttgcctatttagcgaccggggcgtcttccgaagtttcggctgcatttttttctgcggcgattcgtttattgcggatcagttccttgatgctgttaaatacattgacaagaatcattatcagcagcaggctgtcggtgaatgtgaacttgtccggttctgcgaaaagcccgaaaatcgcccatgtcgtgaataacgcaccccagaaccaaagcgccctgcgctgcattcggaccgttttcgcggcttcccgccggcggtattcttccagccatttattttcccgaggtgtcattttcgtcatttatcgaggtttctgctgtggagagagtgggtcagagatcgccccagggcctcttgcccaccaaaatacgcctgttattgacaatgccgagaaggatgctgacgagggagagggcgatccccaacgctcccaaccagtccgaccgggagatgacatcggtacggaataagtagattccccatccgatacttgcggcgattgcgcatctgagcaggatgtattgcagtttcagattgcgttttgccttgtccgggtcccgggcggcggcccgccaacgcagttcttcgggcgtcaagggggctttaggcttggtttcaggcatcctattcctcgaacttgggtttcagtatttccgagtagataatcgcctgccggaggttgaattcttcggtctgggacgtcgttgccgcatccggtgcattgttcgtgagggaatgcgcggcgatttcgtcattcccgctgtcgtccatgagccggttgacggtctgatggcgtaaatgccccctcccggcggctttcggcgtcgtatgttccggtgcgtattcctcggcgggaatctcctccagactctggcattcgtccggaaaaacgggtgcaacgggccacggcgcagggcgtggagcaggcatcggagccggttcggactccgggtgtgcctgcgagggccacgcctcttcgtggccgggtgtgcgggcgccttttccgcgggccttgcgcgattgcgatacgacgttgaatatcatcgctccggcgatgatcacgacccatattaccgttgcgaaatcatccatgtctttaactcaatgttcgtttgacactctctataccctttatcttgcgcagtttgtccatcacggcgtggagactttcggcgtccttcacgtagaggctgacgttgccttcgaaaatgccgtcgtggctgtggatgttcacttcgcggatattgatgttgaaatcggcgcttacgaccttcgccaggtcgagcaggatgccctgccggtcgatgccgcgcagttccgtggtcaccaggtaggacatggccttgtgctgcgaccatttgatctcctccttgacgatgttgcggccgaactgtgtcgcaagacggttcagctcgtcgcacgtggccttgtgtacgatgatgtttcccgaggcggggtctcgataccctaccaccttgtcgcccggaatgggcttgcagcactccgcgatttcgaactgcggttccgtggccggagcctcctctgccggggcgatttcgcccggaattgcggcatcgtccgtctcgtcctccttcttctgggggatgaagagggtccagaatttgagtatcttgctcttggagttgaccttgagggctttgtccaggttgtcgagcgagacgattcccgctccgatcttactgtacagctcctccttgttcttgctgtcgtaaatgggcgtgatcttgcgcagtacgcggccgctcaacttgacgttcagcgacttcatcttttcgtcgagcatctgcatgccccgctcgatgttgttctgccgttcgcgtttgaggaaactcttgatcgactgtttggccttggctgtggtgaccgtttcgagccattcgggcttggggcgggcgttgtcggccgtgatgatctcgatctggtcgccgctgttgatctgcgtggtgatcggttcgagtttgtggttgatcttggcgctgatggcgctgtttccgatcttcgagtggatgtcgtaggcgaagtcgagggccgtggctccgaacggcattttccgggcttcgcccttaggggtaaataccactatttccgacgtatacagcgataacttaaagttgtccaggaagtccacggcgttctccgtcggactgttcagcgccgcgcgtatctgtttcagccacttgtcgaattcgtcctcgtcctgcgaaatggtcgcatgcttgtatttccagtgggcggcgaatccgcgttcggcgatgtcctccatgcgctgtgtgcggatctgcacctcgacccacactccgtcgggtcccatcaccgtcgagtgcagcgcctcgtagccgttggccttgggcatcgaaatccagtcccgcagccggtcgggcttgggggtgtaaatgtcggtgatcgtggagtaaatctgccagcattgggttttctccgacggaaacggcagcggcttgaagacgatgcggatggcgaacaggtcgtaaatctcctcgaaaggaatctgcttgcgctgcatcttgctccagatcgagtagacgcttttcacgcgtcccgaaatctcgtagttgatgttgtcgcggttgagcgaggcgatgatcggggcgttgaacttgttgatgaactcccggcgcgaagcttcgctttcctgcaatttctgcgtgatttcggcatactgctgcgggaagcggtacttcatgcagaggtcctccagttcgctcttgatcgagtagagccccagccggtaggccagcggcgcgaagaggtagatcgtctcgcccgtgatcttgatctgcttgttcatcggcatcgcccccagcgtgcgcatgttgtgcaggcggtcggcgatctttatcaggatcacccgtacatcgtcggagagcgtgaggagcactttacgaaaatattcggcctgctcggaggtgtcggcgttgaacacgccggacattttcgtcagtccgtcgaccatcgaggcgattttcgggccgaaaatgcgttccatgtcctccacggagtattccgtgtcctccacgacgtcgtgcagcagggctgcgacgaccgatttcacgcccagcccgatctcctcgatgacgatcttggctactgcaataggatgcaggaggtacggctcgccggagcggcgccttaccccctcgtgtgcctccttggccaggaaaaatgcacgtttgatgaagttccagtcctcgtcgttcttgcagatcttggtgcacgagaggagcaggtcgtcccatttctcctttataaggttctcatcctcggcagtatatcccatagactactcctttttggtggtcttcatggcttcgcggaccttggcctcgatctcgttgcgcagctcctcgtcgtttttcagcagctccttgacggcgtcgcgtccctgtccgatcttgcggtcgccgtaggagaaccacgatccggccttcttgaccacgccgtaatcgacgcccaggtcgacgatctcgccgatcttcgaaatgccctcgccgaacatgatgtcgaactccgcgcgtttgaacggaggggccaccttgttcttcacgaccttgaccttcgtgcgggttcccagctggtcctcgccgtccttgatgaccgacatgcggcggatgtcgatacgcaccgaagcgtagaatttcagcgcattgcctcccgtggtggtctcggggttgccgtagaccacgccgatcttgtcgcgcagctggttgatgaagatgcagacggtcttggtcttcgagatgctcgacgtgagtttgcgcagcgcctgcgacatgagtcgcgcctgaagacccatcttcgagtcgcccatctcgccctcgatctcggccttgggcgtcagcgccgccacggagtcgatgacgatgatgtcgatggcgctcgaacggatcagcgagtcggcgatttcgagcgcctgctcgccgttgtcgggctgcgaaatgagcaggttgtcgacgtccacgcccagtttctgtgcgtagaaactgtcgaaggcgtgctcggcgtcgatgaaggccgcgatgccgccggccttctgcgcctcggcgatggcgtgaatcgccagcgtggtcttgcccgacgactcgggaccgtagatctccacgacgcggcccttgggatagccgcctacgccgagcgccatgtcgagcgtgattgaacccgtcgggatgaccggaatgtcgttcacttcggtgctgttcatgcgcatgatcgagcctttgccgaagtccttctctattttctgcatcactgcgtccagcactttgagcttgtccgcgtttatctgtactttttctgccattatggttttgttttgtatcattaactttgtttcggtccgctgctgtcgaacttcgccgagcggcgggagccgttgtttcgccgccttgcggcgtcgggtccccgcccgagacggggatttagggggtgggtcggattcgtaaacgacgctttaggcggcgaatacggcggtcggacgcacatcggcgggacaaattgtatcctgtccttacttataggaatcaatgatctgccggtagtggttcttggtgtccaccttggtgaaaatcttctcgatgcggccttcggcgtcgatgacgaacgtcgtgcgcagcacacccatgtacttgcggccgtacatcgacttttcggcccacacgccgtaggcttcgcacaccgagtggtcggtgtcggagagcagcgtgaaattcaggtcgtgcttgtcgcagaaactgcggtgcgacttctcgctgtcggggcttacgccgatgatccggaatcccatccgtgtcagttcggccttgccgtcgcgcaggcttttggcttcgagcgtacagcccgaggtgttgtccttggggtagaaatagagtatcgtgcgctgtcctcgcagatcggcaagcgtcagaggctcaccgtcttgggtcgtggacttgaaatcgggggccatctcccccgcctgcaactgtgtcatagcgttttccgaaaaagagattattttctcaaaggtatgaattttccggcgattttcatgcttcccgggcgacttttttgcggcctaatcccattggtaggtcacttcgatctgctcgttgaactcctcctgcgtggtgttgagccggtgcaggcaggcaggacaccggatggccgtttcggtctcgacgtattcgccgcacccgacgcacatcggcagcaggccgtagcccggctgcatggagtgctcgaactgcgctccgcagtgcttgcacctgattctgtaagctgttcccattgtcgttttgtttttggttcacgctgcaaaggaacggtctgcgagtgacaggttgtgacacagcggtgaaaaatgtaaaataaacccgccgacagctgtcggcgggtcgttcggctaatggtggtgttcggcctccatggcctcctgccgggtcttgtggaccgtgccgtgggggtgttccgccggggcgtaaatcgagtagattttcagcggtttgtcacccgtgttgacgatgttgtgccattttccggccgggaccaggatcgcatagtcgtccgagacctcgcgcacgaagtcgaggttgtcctcgctgtcgcccatcatcacgcgtgccgtgccctcctccacgcgcaggaactggtcgatgtcgtggtgttgttccagccccacgtcgccgccggcgggaatcgccatcagcgtcacctgcaagttgctgccggtccacaatgcggtccggaaattctcgttcgcgagcgtgtggctttcgatgttcagcaccgtcggttcggctccgtgatctttcagcgagacgggttcggcggaggcttttgcctgcggggccggagcttgccggcagcacgatgcggcggcgagtgcgaggcacagcgcgccggtcgtcaggaggtgatttcgtttcatgcggtttgctttcaaagtttgtggaaatatagtgaaaaatttacattttcggggtgtttgccgcaatatattcgcggatatagcccgtcagctcgggggagtcgacgatgcggatgtcgtccagcagccccacgacgaagcgtcccaccccggccattccggccacctccgtgtcgagcgaccagcgtccccgccccagcggtttcacatcgcgttcggccaacggatactcctcgcacaacaggttgtaggccagcgttcccagttccagccgcacgcggcggcgcgccccgccgtgcatgcggaaggcgtcgatgaatccctcgctgtgggcttcttggtgctcccacgccgcttcggacagctccacggagccgatacgcgaggttttgaagagtttgttcgtgtggctttcgaggtcgtagcaccacacctgcacgtagttggtcgtgaaggcgaaaggctctaccctgcggtcgcggaccccgcctccgtgggccgacaggtagccgtgcagcacggcctgccgctcctgctcgatggcctcgatcagccgccggatgttcggggcgtttttgccccgcacgacggtgtcggccagcgtcttgttgtcgtagacggagtagagtttgcgcttgaggttctgcttgagcatattggtgtcgtcgatgttctcgatggtgtttttcaggatcacggcctcctcctcggtgaagtgcaccagctgcgagatgtcgcggaagtgcggcgactccttgtcgagacggatgcagtcgcccgatttcttgatcacgaaccccgcctcgcgaaaggtgtcgatataccggtagaccgtgcggcgcgacatctggagccgttcggccagctggtcgacgttgtaggtggtgttggccgtcagcagcttcataagccgcagcaggcgttcgagtttgggttggtccataattattcggcagcagacggctgttcgccgtgcagaggtcgtaaattagccataagaaagtcggatgttctttttatgaagtcatcgaatgcaatcagcatcgggtcttcctttccgccgtgagcggcattttcgacaatcatcaactctttgggtgtcgtttcgggcagcgattcgattattttcctgctcatccagacgggagtgcggaaatcgttctcgcctacgatcaggaacagaggtttttcgaattccggagcgatatgtacgggcatcagttcggtcggaaaatcatccggaaccagcaattcattgcgggtcttgtttttgtactgcatgaccaaagggatgaaatcgtcgaaatccgtcggaagggaacggccgatgaaagcattcaccagattgtcggtgtgtgccgtaatcatggacagataggcgcctgtcgaccagccgacgatggccgtcgctccgtccagaacttcctcctgttcggaggtcttccgtatgacagcccggtaatcttccagcatttccgtataacacaggtagttgcgatccattgcaaagggtgaactcttgccgaatccgcgccagtcgaaagtcacgacattgaacccccgggaggtccagttcttcgccagataaagttggaagtaggacatattgcctgcatcgccattgcatatgatgatggtcgggcgctttgcctcacccggcgcttcgtgggttcggcggttttcgttcggattccgcagctcgctctcggacggcgggttttgtgcagggaaaaaccaggtttcgattttatagccgtcgtttgtgatgacttctaaatttctatatatcagcctcatgctttccggcttcctgatatatacggtatccggaataattgcatggcagtttgcgattcctgaaaaggacgcaatcaaaagagtgacgaacgctttcatgctgttttcggcaaatatacgaaaaagtcgtgacattgtctgtcacgacccgctttcgggttggttcataggcggtcagtcgagcagttcggagagtttctgcgcgagggcttcgccccgcagttgtttggctatgatcttttccgtcgcacagtcgatcaggaagcaggaagggataccgcccagcgtatagtcgctccacgcctgtgtctggcgcgggtgcagaccgaatccctgatgaatctgcgtccagcgcatgccgtaggtctcgatgcattcgagccaccgtttgcggttggcgtcgtaggagacgccgaagatgtcgaatccccggctgtggtatttctcgtaaagcgcggcgaggttcgggaactccgcccggcaaggcccgcaccagagggcgccgaagtcgagcagcacgtagcggttgcccggtttacggactgtcgcggcgagtgaaacggtatccccttcgggcgtctgtcccgtgatgtcggcataagatgttccgacatcggcgcgcatcccggcgatcgtcttgcgcagtccgagcagggcgggatgcttttgaaatgcagccgggaacgaatccaataatggcagaagctcgcgtccgggacgattggtcagtaattcgttctccagcagggatagcgccagggcgttgcggttctcgagaacgaccgcgcggaataaactgtcgcaggcttcggccgtacgcagcggggaaaggcctttttgcctcaacccggcgactttttgcggcagttcgttcctgaactcgttctgcggcgttccggtcaggatgaattcgtcttcattgcgcttttcaacacggatctcgccggtttcgaggatgaaatccgagtcgctgatttgttctccgtcggcgcctcgtcccatatagaggaaggcgctcaccggatagggccagcttcctttcattgcgaaggacgagttgtcgattcgcgccgagtcgatgatggtctccgggcctccggcataggtgatgatgtacatgtattttccgtcggtaaacgccgggtcgcggcccgtaagggtgaattttacggctgtcgattggctgcaacccgccagaatcgcggttgcggcgatgatcgaaaggggctttttcatgggtttgagggttagtgactccaaatatacaaaaaagtcgtgacattgtctgtcacgaccctctgtttgtaccgacggtatgtgtacccaatttattgggcgagcacctttttttcgatctcctcgacctggcggcggaacgccttgtcggtctcgatcagattcgtcacggccttgcacgagtggagcaccgtggcgtggttgcggcctccgatggccgacccgatcgtcgtcagcggcgccttggtgtgctgcttggccagatacatggcgatctgccgggcctgggcgatttcgcgcgtgcgctccgtggagttgaagcgtgcgaagtccagattgaggtattcgcacacgacctcgatgatgtggtcgatggtgatttccttctggtagagcttcacgtagaccttcagaatctccttggccagcgacgtggtgatcttgcgtccgaggaacgaggcgttggccaccagcgacgacaatgcgccttcgatttcccgcacgttggccgagatgttgtccgccaagtacgccaccacgtcgtccgtgatctgcgccccgagtttctgcgccttggcgcgtatgatcttgagcttcgtgtcgtagtccggcgtgttgagctgggccgacagtccccatttgaaacgggtcagcagtcgctgctcgatgtccttcaactcgacgggcggcttgtccgacgtgaggatcagctgcttgcccgccagttgcaggtggttgaagatgttgaagaacgcgttctgcgtaccggtctttcccgtcaactcctggatgtcgtcgatgatcagcacgtcgatcatctggtagaagtggatgaagtcgggaatctcgccgttcttgtaggccgtctggaactgcgcctggaacttgttcatcgagacgtacagcacctgcaactccgggtggcgctggcgcacctcgtggccgatcgactgcacgatgtgggtctttcccagccccgaatccccatatatataaagaggattgaaggggttgtttcccgggttcaccgctacggacatgcccgccgagcgggccagccggttgcactcgccctcgatgaaggtcgcgaacgtgaggttcggattcagctgcggatcgacgataagcttcttgacacccggaattacaaaaggattttttatatttgcggtgttggtctgcgcattgaaacgcgagatggctgtcgtgtcggcgtcggccgctacgggaaccgccggagccgtcgcacggggcacggcgtagtgcagtctcgtctgctgcccgtagagctgcgagatgatcggtttgaggaacgggatgtagttcttctcgatttggcggacgtagctttcgttgggaaccctcaagcgaagcgtcgtgccgtcgaattcgagcgggacgatgggctgaaaccacttttcgaactcctcggcggaggtccgggccttgatctggtccaagcagttttgccatatatcgctatatgtccgtgtgttgtttaacatgacagagggttgcactatttttgatgtgacaaagttgtgaataattttgcaaaaagattctcgattttatgttgcagttctcctttttttgtatatagaaaagcaacggtttccggggtctcaattttaactccctgatagtgaattatcgaattttatttcgtatatttgcatataatttttttgggacttccgaagtcaaactataaataaaactaataaacttatggcaaacgaattggaacaattggttctgaaaaaagcccagagttggctcgacggccactatgacgaggcgacgaaaaagcaggtcaaatacctgatggacaacgatatgaaagagcttgtcgagagtttctacaaagacctcgaattcggtacgggcggcctgcgcggcatcatgggcgtgggttccaaccgcatgaacgtctatacggtgggcgccgccacgcagggtctttcgaactacctgaagaagaacttcgcgggcgagcgggtgcgtgtggccgtggcccacgacagccgcaacaattcgcgcatgttcgccgagcatgtggccgatattttcgcctcgaacgggtttcaggtttttctgttcgacgcgctccggccgacgccggaattgagcttcgccatccgcgaactgaagtgtcattcgggcgtggtcgtcacggcctcgcacaaccccaaggagtacaacggttacaaggcctactggaccgacggggcgcaggtcaccgagccgcacgacaagaacatcatcgccgaggttgcgaagatcaccgacgtggatatgatcgagacgggcaaaaatcccgaaaatatcaccatcctcgacgagaagttcgatgaaatctatttaaataaggtgcacgaactctcgctttcgcccgaaagcgtgaagaagcaccacgacatgaagatcgtctattcgccgatgcacggtgcgggcgtgcggctggttccggcgtcgctgaagaaattcggcttcacgaacgtgatcatggtgaaggagcaggctgtcatcgacggcgacttccccaccgtcgagtctcccaaccccgaggagcgcaagacgatggcgatggccattgatctggccgcgaaggagggcgccgacctggttctggccaccgaccccgattcggaccgcatcggcgtggcgctgcgcaacaagaagggcgaatacgtgctgctgaacggcaaccagaccctcgtgctgctgttgagctaccagctgacccgctgggccgagcgcggcgagctggacggcaaccagtatgtcgtgaagaccatcgtcacctcgcagatggccaacgccgtggccgagcatttcaaggtgaagtgttacgactgcctcacgggcttcaagtatatcgccaagatcatccgcgagaacgagggcaaagccaagtacatcggcggcggcgaagagtcgttcggttacctggcgggcgactacgtgcgtgacaaggacgccgtgtcggcctgctcgctggccgccgaggccgccgcatgggcgatggatacgatgggcctgacgctctacgagtggttgcaggaactctacgtgaaatacggtttctaccgcgagggcctcgtttcggtggtccgtaagggcaaggagggcgccgagctgatccagaagatgatggtcgacttccgcgccaatccgcccaaggcgatcctcggttccgaggtggtgaagatcaacgatttccagacgctcgaaacgctcgacgtgaagaccggcgcgaagaccgccatcgagcaggaccgcagcaacgtgctgcaatggttcaccgccgacggcacggccgtttcggtgcgtccctcgggcacggagcctaaaatcaagttctacttcggcgtgaaggcgccgctggcttcggtcgccgatttcgacaagacgctggctgaactcgacgccaagatcgaaggcatcaagaaagacctcaagctggagtagccccctgctttcggggcggttccgtcccgccgatacctccgaacgattccgttcggaggtatttttttgctctggggcgttccggggcgtttgcacggccccgaaaagggctggctccgcgggcatgaaatcgcctttgctctatattctcgaagtgctcttttgtagcggactgctcctggcgttctaccgcctgctgttggtccgcaaggtttcattcagggcctgccgccgctatctggtcgctgccgtatttctctcggcggtcatcccggcgctcgacattccgctctaccctgcccggacggtggtctatccgctgccgctgatcgccgcgcccccggctgaaaacttcgtgcagacgaccggggagcttcccgctgccggtccggtcgtcccagccggctggcggcgcatattgcgcccggtggctgtgggaggctatctgacggcggtgtttctgtcgcttgggtttcttgcggtccgcatggtcggaattcgccgtctgcggcgacggtcgcgtctgaccgattgcggggcgtacacccttgccgagcatccgcagatcgccactcccttttcgttcctgcgcacggtttttctgggcgagggatacgaagggcgccggcgcatgatcgttctctgccatgaagcgggtcatgtccgtcaccgccattcggcggaacgcatcgccgtcgagctggtccgcagtctcttttggttcaatccgttcgtctggattgccgggcggtggttgcaggaggtgcacgaatgggaggccgaccgcggcgtgctcgacgccggttacgaccttaccgaatacagaacggttatttttcaccaactcttcggccataatccggatatagcctgcgggttgaatcattcactcaccaaaaaacgatttgccatgatgacccaattcagaaaacgccgttttgccgtgctgcggctcggtgccgccattcccgtggtggcagcaatgatgatgctttgcagttttaccgtcaaaactcctcttccggcagccggggatccggaccggccgaccgttacggtacatatttcctccggcggaaagattctcttcaacggccgtcctgtgacggtcggggatctggagcggctgatcgccgccgaacgcgaaaaactctccgaagccgaccgtgcgcagatggaggtggttctgcgggccgacaaagatgctcctatggccgatctggccgacgtgatggacgcgtcgcgccgtgcgcatgcctttcgtctcaaactgactgcggaagcttccgatcccggcatcgtgcggatgcttccgcccgatcccctgcgcctgcctgccgacagcgcggattatgctttgcccgcgacgaaccgcaacgacaggtaattgcccgcgccgtgccgttgaaactgaccgaaccaagacgctgatccctcccctgatgccataagcgggaaatgccccatacgacggccaaagccgccgcatggggcgtttttacggcttcgggccggggctttgccgcggtcggcggcgttttataacttggggttgccgcggtgacgctccttgtcgcgggcggtctttttggcgaaattggcctcaacggccgccgtgaggtccacgcccgtctggttggccaggcacaccagcacccacagcacgtcggccatttcgtcggcgaggttctccttttcgcccgccttgaacgactggtcgccgtatttgcgggccatcacgcgggccaactcccccacctcttcggtcaggcaggccatgttggtcagttccgagaagtagcgcacgccgtattcccggatccaggcgtctacgcgctcctgcaattccttgatttccatcttattttactcttatcagattcagcccgtcgcgcagcgggacgatgacgttctccacccgtgcgtcttcgacgaccatgcggttgaattcgaggagcgcctgcgtgtggcggtcgttgtgcgccacgggctgcacgaccttccccgaccagaggatgttgtcggcgatcagcaccgatccgctgtgaacaagcgccttactgccgtcgtcgcccatcagcatccggtaataggccggatattcgcgtttgtcgccgtcgatgaacacgaggtcgaattcgccgcccagtttcggggcgatgtcgagcgccgagccgatgtgcaggcggattttgccgccgtgggccgagcggtcgaaatacgatcggatgaactcttccagctcgtcgtccacctcgacggtgtgcagttcggcctcttcctccagccccgcggccatcgagagcgccgagtaacccgtgaaggtcccgatttcgagcgcccgccggggccgcagcatccgtacgagcatctccagcagacggccctgaatgtgccccgagatcatccgcggcgccacggcccgcagattggtctcgcggtcgagttcgtgcagcagctcctcctcgggttccgaaaaatcgtggacgtatttttcgagagcgtccatctattcctgataaaatccgtgtttgttgaaggcgtacgatgcggcgatttgctccggcgtgtcggcttcgagcgcgagcaggcattcgcgcgtgaattccagataccccgagccgttggccgtcacgacattgccgtcgcgcacggcctgccgctcctggtagagtttctcgcccgtgtagttcgcgccgccccattcgcgaagcatttcgaggccgtttccggtgtgccttacgccgttcaggaatccgtgggccgcgaggaacgatgcggcgttgcagatcgcaccgacgagaatcccgtgcgacagggcctcccttaccagcgggacgatccgttcggtttcgggcgtcgcccagctcataccgccgacgaggatcagcccggcgcagtcgtccggcagcgtctccgtatcgcagtcgggggtgagggtcatgccgccgatcgagcgcacgggaactcccccgggcgtcgcataccgcacggcgtggcttcccgggcgtcccggcataatgccgccgcgaagcgccggggcgaggaatgccgactcccagtcggcgaattggtcgagtaatacgaacaatacggttttcatcttatttgtagattaatcgtgacatatccgaaaaaacctcctcggccacctccgtgagctgccgggccgtcagggcgcggaccttggcgtagacctgctccatggtgtcgatgccgtcgtggacgagcaggcttttgcccgccccgagcatgtagctttcgttgctctcgctcgatatggccagctgggcgatgaactgtttcttggccatcgatagctggcgcgccgtcagcggcacggtgcgcagtttgtgcaactgtccttcgatcagctcgatgcactgctccgcgttgctgtggtccgaactgaaatagatggccacgatgcccgtgtcgccgtagggcgtgtagctggcttcgatgttgtacgaaagtccgttcttctcgcgcaccacgatgttgagcagcgagttggcgcacggacctccgagaatgttcgtcacgagggccagcggcagccgccgatcctccgagatgccgaatgcccggctgccgatgatgcagtgggtctggtgcgtgtgcttcgagaccgtcttttcgaaggcccggtaaggcgcgggcgccgcgcgcacgaagccgcgctgcgaggcgggctgcgaggcgaaatagcgtgccgcgacggcttcggcggtcttggccgagaagttgccgatcgacgagaataccatctggtcggtggtgtgcgtgcgtgccgtgaaggcgcggatcgcctggccgtcgtagcgcatcagcgacgccttgcggcccaggatgttgtggcccagttccgaaccttcgaacagcatgtcctcgaaggtgtcgtagatcaggtcggcgggcgaatccttgtaggtgttgatctcgtcgacgatcacctccttttcgcgctccagctcccggtcggggaacgtcgagcggaaagcgatgtcggcgatcagctccgcggccttcgcgaagtcgcccttcagcgtcgtggcgtgaatcgtcgtgtcctccttggtggtgaaggcgttcagctccccgccgaggttttccaggcggcagttgacctgccatgccttgcgtcgctcggtccccttgaaaaaggcgtgctccgtcaggtgcgccagtccgtactctgcgggatgctcgtcgcggctcccggcgccgatcaccagcgcgcagtgcgccacggtgtttcgcacctgacggtgaatgccgcggatgccgttggggagtgtataggtagagaattccattcaattgaaaattaaagattaaaaatgaaaaattgggctgcgcggctatttttgcacatgtgtacgacaatttttcatttttcattcttcattatttttgcgcgcatgcgcaaaaatttgcccgtatggctttcggtgcacttttccagttcgcgcggcgtgccttcgaacacgacccgtccgcccgccgtgcccgcctcggggccgaggtccacgatccagtcggcgcatttgatgatgtccatgttgtgctcgacgacgacgatcgtgtgtccgcgctggatcagggcgttgaacgccgcgagcagtttcgagatgtcgtggaagtgcagccccgtcgtcggctcgtcgaagatgaacatgacgcctccctgcgccgaatccttcgtcaggaacgaagccagcttcacgcgctggctctcgccgcccgagagggtcgacgacgactgtcctaacttgatgtatcccagacccacgtcctgcaacggttgcagccgctcgacgatgcgccggcaggtggcgttcttcttgctttcctcgccgaagaaggcgatggcgtcgtccacggtcatctccagtacgtcgtagatcgacttgccgcggtatttcacttcgagcacctcgtcgcggaaacgccgcccgccgcacgcctcgcagaccagttccacgtcggccatgaactgcatcgagaccttgatcatgccctcgccctggcactcctcgcaacggcctccggcgatgttgaacgagaaggccgaagcgcccagcccgttgtgctgggcatagggctggtccgagaagagtttccggatttcgtcgtaggccttgatgtaggtcacggggttcgaacgcgacgatttgccgatggggttttggtcgaccatctcgaccgatttgagcagctgcacgtcgcccgtcaggccgtcgaaatcgccgggtttcacgcccgtgtcgtagagcaggcgccgcagcgccgggtagaggattcccttcgccagcgacgattttcccgagccgctgacgcccgtgatgcaggtcatcacccccaacggaatccgcacgtcgacattgcgcaggttgttctcccgcgcgcctttgacggttatcgagttgctccaaccgcgggcggttgccggaacggcgatctcgcgccgccccgtgaggtagtcggccgtgaggctctttttgcttttcagcagttggggcagcgtgccgctgaagaccacttcgccgccgttgtaaccggccttgggtccgatgtcgacgatccagtccgcggcgcggatcacctcctcctcgtgctccacgacgatcaccgtgttgcccaggtcgcgcagctgtttcaatacgccgatcaggcggttcgtgtcgcgcggatgaagcccgatcgacggttcgtcgaggatgtagagcgaaccggtgaggttgctgcccagcgaggtcgagaggttgatgcgctggctctcgccgcccgagagggtcgacgacaggcggtcgagcgtcaggtagcccagccccacgtcggcgaggtattgcaggcggttgcggatttcgacgaggatgcgcgacgccgttttcgtgtcgtgttcgtcgagttccagccctgcgaagaaggcgatcagggagtccacgggcatcgccaccagatcggcgatcgtcttgccgccgacgcgtacgtacaacgcctctttgcgcaggcgcgagccgccgcattcgggacaggcggtcttgcccgtgtagcgggccttcatcacgcggaactggattttgcgccgctccgagtcgatgtattcgaaaaattcgtcgagtccgtggaaatattcgttgccgcgccacagcagccgtttctgctcgggcgtcagttcgtggaacggcgtgtggatcgggaatccgaacttcgaggcgttctccacgagctgctgcttccatttgcgcatcgtctcgcccctccagcaggccacggcgtcctcgtaaatggtcttgctcttgtcggggatcaccaggtcctcgtcgatgccgatcaccttgccgtagccctcgcaccgggggcaggcccccagcgggttgttgaagctgaagaggtgttccgaggggcgttcgaactcgatgccgtcggcctcgaagcgcgacgagaactcccgtacgccctcgtccgtgacgatttcgcagatgcccccgccgtaggagaaggcgcgggccaccgagtcgcggatgcgggtctgcgagtcctcgtccgtcgctacgcgcatgcggtcgacgacgatccggatttcgtcggcccgggtgtcgggaccgattccgggcagcacgtcctcgatcagccgcacttcgccgcccgtgtagacccgcatgagaccctccgagagcagcagcgtcagtttttcgatgatcccctgcccttcgcccaataccagcggtgcgccgatgaccacgcgctgtccgtcgcgggcgagaatccgggccgccacgtcatccacgctgaagcagcgcacctcctgccccgagacgggcgaaaaggtgtgccccgcgcgggcgaacagcagtttgaggtagtcgtagatctcggtcgtcgtgcccacggtcgaacgggggttgcgcgtgttgaccttctgctcgatggcgatggccggcgcgatgcccgtgatgatgtccacgtcgggtttgttgatcttcccgaggaactgccgggcgtaggccgaaaggctctcgacgtagcggcgctgcccctcggcgaaaatcgtgtcgaaggccagcgtcgacttgcccgagccggagagtcccgtcacgacgacgagtttgttgtgcggaatttcgacctcgatgttgcggaggttgtggacccgcgctcctttgatatatatggagttttcgtgttctttcatgttacaaatattccaatccgcttttccgagtgtttcacactcgccgttatgtaccttttggtggtaaaaggcgcccaaaaccatccgcatgccgttctggcgggagtgccctcggattcgcgttgagcgggcgcagtaaatcgggcctttacggcgcaaaaacacgcgccgtttagactgtggcggctcggcaaacagcaagctgtctgccctcgcctgcggacgcctttacagcccccccccgctccgggcgcgcgtttcctcggtctctctttttccgttgcgaacgataatgcggatttttttccgtcaaaaacggagctgacccgcaaatattccaatccgttgttcgtatttcattccgcttcgtcccgaaccgagccgccggctttgcgcaatttttcgataagccccgctgcgcggctttcgcggatcgcgagccgcatcgtacagaggttgtcgaaggtctgctcctcgatgcgcggctgctgctccttgacgacccgcatgatggcgttcatcgccacataggggaaatccacccgcaccgtgcggtccaccgtcagttccacgatttcggccgctgcgatggcctcggccgccgactcccggtaggcggcgatcagccccggaacccccagtttcgtgccgccgaagtagcggaccacgaccaccaggcagtccgtgatgtcgttcgagagcagttgtccgaggatcggttttccggccgttcccgagggttctccgtcgtcgttggcgcggaacgcctcgccgcggggtcccagccgccaggcgtaacagtggtgcgtggcgtcgtaataccgtttgcgcagcgcgtcgagccgttcgcggatctcctcctccgtgcgcacgggataaatccaggagaggaacttgctgctccgctcccggcaggcggcttcggcgggggccgcgacggttctgtaactgtcgccggccacgtctaccgaacctttctgaagagccgttcccagcggatgttcgcggggaaactcttttccgcatcgagcgacagccatacgaacgacgccttgcccacgatgtggtcctcgggcacgaagccccagaaacgcgagtcggccgagttgtggcggttgtcgcccatcatccagtagtaattcatcgcgaaggtgtactccgtcgcctctttgccgtcgatcacgatgcgtccgtcgcgctcttcgagcgtgtgcccttcgtaggcctcgatgatgcggcggaagagcggcaggttctccgccgtgagctgcaccgtgtcgcccttcttcggaatccagatcgggccgtagttgtcctggctccagcggggcgcgccccactgcgggaacacctcgtcgttgggggtgtagatatagcggttgaccgaaatgacgttgctcaagcccctgaccttctcggcgagttcgtccgtgaggttcatgtagtagcccgagccgtaaccgctgtactcccggattccgaggttgtcgatggcgtactgcgtgaagggggccgaggtctgcaccacgtagttgtattgcagtccgggtatcgcctcctgcggttcgccgttgacccacacctttccgttgcggacttcgagcgagtcgcccggaagccccacgcagcgtttgatgtagttctcgcgtttgtcgaccgggcggctgatcaccgtgtatttttcgttgaggcgtttgcgtccctcctccttgccgaacgactcctcgaagctgcgcagcgtgtcgtaataggtcacgttctggttttcgagcagcaccgtgtcgcccgccgggaagttgaagaccaccacgtcgttgcggcgtatcggcttgagccccttgaggcggtggtagggccacttgatcgcctcggagaacgatttcttggtctgcgagaagggcatcgtgtggtgtacgaaggggaacgacagcggcgtgttgggcatctgcggtccgtaagccaccttgctcacgtagagatagtcgccgatgagcagcgtccgctccatcgacgaggtggggatgacgtacatttggaagatgaatagatgcaccagcgtcgccacgaccgtcgcgaagatgatggcgttgacccattcgtacaccgtgcggtaggttttgctgcgctggcacatcttcacgttgtggctccagacgtagcggtagaagaacttcgtgatgtagaggtcgaagatgaccggcagtcccagcagcagccagaggttgcccgtccagaccacgaaccagagcgtataaagcaacgcggccagcgtgaaaccgacccatttgttgcgtagcaagtttttgattttacccatgcggaaagccccgattttaattgtgaattatgaattgtgaattatgcattgcgcagcaggtcgtccatcgagtagaccccttgttttccgcagaggaattcggcggccacgacggctcccagggccagcgtgcggcggttcttgatcgtgtgtctgatctccagcacgtcgtcctccgattcgtaggtcacggtgtggatgcccgggacggcgccttcgcgcacggagcggatttcgatccggtcggcgggcgcctctccgctgcgttcgatgcggttggcggcgtgttcgattcccggagccaggttgacccagccctgcttgccggcgaggttttcgacgattccctcggccagcgtgattgccgtgccgctcggggcgtccttcttctgggtgtggtgcacctcctcgatgcgcacgtcgtagccgcccacgcggtcgatcatcgcggccagctgccggttgaggcggaacatcaggttcacgcccagacagtagttcgaggcgtagaacaacgccccgccccgctcgcggcacagctcctgcaactccccgaggcggtcggtccagcccgtcgtgccgctcaccgccgccacgccgcattcgatgcaggtgcggatgttccggtaggccgtttcgggcgtcgtgaactccagcgcgacgtcgatgcccgccagatgtgcggcgtcgagttcgtgcgcgttgtccgtgtcgataatcagagccgcttcgtgccctctttccgtgagaatccgttcgatttcgcggcccatcttgccgtatcctatgattgctgctttcatttgttttgtcgagatattcgtacaaagatacgaattatttatgaatctaaacgcaggagagcgtacaatagtattccggaatttcgtatatttgccggacaaatcatttccggtatgcgctattttctcgaactccggtacaacggggccgcctactgcggctggcagcggcagcccgaccagccgtcggtgcagcagacgctcgaacgggcgctcgctaccctgctgcgcgaaccggttgctctgacgggcgccgggcgtaccgacacgggggtcaatgcggcctattacgtggcgcacttcgactgcgaacgtcccgtcgccgatcctgcgcagacggtctgcaaactcaatttcctgctgccgggcgacattgccgtgggcagcatgacgcccgtggcggaggatgcacacgcccgcttccacgcccgcgaacgggagtaccgctacttcatcgagccgcgcaagaatccctttacgcggcacgagacgtggcagtattacgtgccgctcgacgtcgggcggatgaacgaggcggcggcgatgctgaccgcgtacgacgacttcacctctttcgccaagctcaattcgaacaacaagaccaacatctgccgtgtgaaggaggccgtctggacgatcgactcccgcggcacgatgtgtttcacgatccgtgcggaccggtttttgcggaatatggtgcggtcgctggtaggcacgctggtcgacgtggggcgcggacgttacacgcccgacgggttccgctcgatcgtcgagagccgcgacctgtcgcggtcgagcgccggcgcgccggcccaggggttgtttctctcggacgtggtttacccggcggacatattcgaacatcaatgtttctctaaattcaaaatgttatgattggaacgattgtttggctgatcggcctcgtgtgcgcaatctggtgcgtgctggacattttcaaaaagaacatctccacgggcggaaaggtcatcgcggcggtcgtggtgctgctcaccagctgggtggggcttgcggtctactacttctacggccgcgaccatttgcaggagtggttcaaataaccgtcctgtgcaggcgaaaacatgcggcggacccacagaggtgcgggattaaagtaatgtaacgacttgatttatatggtagttacatttttgtataggagagtaggtaacgagaaggcaacggtttgttttcagcttcttgcgctcaaataccgcatttcaaataacctatcgcaagatacgaaaaattttcgagatgggcaaattaggcagggtcaaccggcgagtgcaattttaagaaattagtttaaagaacttttttagacgaagaaaattttaattttcccgatgtcttctgttcattgtattgcacttgtttaataaactcttccgttaacacaaagaaatctgccccattcagtatatattgcctgatggtttattctgattttcaattgccccttttctgtcaggggaagcatatgaatcgacaaaacatacttttgtaccgatagtttttgcaattttcttatgacaaaagaattcgctgccatggtcgctgtgtcgcaatggtcggggacggcatcaacgacagtgcggcgctggcgcaggccgatctgggcattgccatggggcaggggagcgacattgcgatcgacgtggagaaggtcacgattctttcgtccgacctgacgaagatcgccgcggcggtccgcctttcggccgcgaccgtgcgcaccgttcggcagaaccttttctgggcgtttatctacaacctgatcggcgtgcctgtcgccgctggcgtgctctatccgctgaccaggtttctgctcaattcgatgctcgtcggggccgccatggccctgagtagtgtgagcgttgtggccaatagcctgcagctgagtacaaaacggctcggcacgaaagccgtccataaaataaatacagaatttataaccaaaaaacaaacagccatgaaaaaagagtatcgtatcgaaggaatgatgtgcaaccactgccggatgcatgtcgaaaaggccctgaacggcatcgaaggtctccgtgccgttattactctcgatcctcctgccgcgacggtcgaattcactgggcgggagccggagctggccgaattgcagcgggtgctgggcgaagattataagatcacggagcgttgaaaccccggtctcggagcggccgctatccatctataaaggtattgcggctcctgaaaacccctaaaattaggtattgccgttcccggcgtaatgtcgtttctttgtattactaaaatctgccgagacgctgcgggacggcccgttgcgccgaatgcggaaaacgaagaaaaaattcaaaccgattatgagacatttcgtttattgtgcggcgcttgcagccgccgtatttttccttgctgggtgcggcgggaacccgaataaaaagaacgcttcggagactcaaacctcagaaacgcagagttccgtcatggaggtcgataacctgctcgccgatgctgagaagttgaccggcggcaaggtgacggtcgagggcgtctgcacgcatatctgccgccacgggggccgcaagattttcctaatgggaaccgacgatacgcaggtgatccgcattgaagccggagagaagatcggcagcttcaagcccgaatgcgtgaacaacgtcgtgcgggtgacgggcacgctggtcgaagaccggatcgacgaggcttaccttgccgagtgggagctgcggctcaaggaccagatcgcccggcagcacggcgagggcgaagccggatgcagcgccgaacatcaggcccgcggcgaatcggttgccagcagcaccgaaaagcgtatcgccgacttccgtgcccgtatcgccgaccgcaaagccaaagaaggcaaggaatacctttcgttctaccatgtggacggcgggagttatgaagttttgaaataagaagttttgcacgtcatggggacacggtcgtttatgtccgccgtgaggaaatggagcaggcccgttcaccgcgacctctcctttttcttttcgggcgtactgctgatttatgcggtttcgggcttcatgctcaaccacaaacgcgatttcaattccgattattcggtgcgccggaccgagctggtcttcgcacaggagataccgcgcgccgagcaggagtggacccgtgcgcgggccgaggaactgctcctgcgcgtcggcgaggagggcaattacttgaaacattactttcccgaaccggaccggttgaaagtctttatccggggcggcagttcgctgacggtcgatctggcgtcgggacacgccgtctacgagtcgatccgcaagcggcccgtgctgagcagtctgaaccggctgcattacaatccgtcgcgctggtggacggtcttttcggatgtctttttagcgggattgatcgtaatcgtgctttccgggctggtgatgatgcgcggcccgaaaggattgcggggccgcggaggcgtcgagctgatcgcggggattctgattccgctgctgtttattttcctgacctgatccgggaaactgcgtgtgataaaagggcggacgtcgaaaacgtccgcccttctcttgcgtatgggtttgttgtcatcgttttgccgtgccgaataccagcagcgggacgaagaggaagagtccgaacaagacgacgccgacggtctgccagagccgtccgccgggcgatctgcggcggatgagcgcatagaacgcgccgagcacgagtcccagccagagggcctgaaacgacacctccgcaatccggggctttacgtagccgtccagcggcgaggtgaacgacagttcgaagggaaacaggtattttgcgtactcggcccatgcctgcggtttctcttcggggcggtattcgtccgccagtgaatagtcgcgggcgttcacggcgacatagcgtttcgattcggcgccttggatggtgaccgtccagtagaacatgtcgccgatgatcatcatgttctcccgtgtggggccgaatttcccgacgggaatctcgtgcagtttgtaatcctccgcaccgagcgtatagaaacgcttttcgctgtccaccagaaaaccgagacttttgcggtcggcgaactccgtgacgaaaatctggccgatttgcagcgagtccgcaacgtcggtacggcgcacgaacgggcggccgcggacctgcttcatgtggtagacgcgcagcgcgtcgtccaccagcaggtagccgttgtcgtaccgcttgcgcgtcgaggggttgccggagacgacgcgggccgggaacgaaaatcccttgtcccgcaggactttggtgaatgccgcgctcttcttttggtcgatggtgttggtctccatatcgacgaactcgattccctcgccggtgatgcggaacacgtccgtcgccggttctaaatcgatgcgatcgggcatcgattccagcagttgatagaccgtcggtctgcggcggttgatttcgccgggcgacgtgcggaacatgaagttcgtgcgctccacgtcgcgcgattcgaccgccacgccctcgatttcggacggaaacctcccttcggcggcgagttggcggtaatagaacgtcggcaggatactgtcgaactgctgctgggtgtaggtgttgccctgcagatcgcgtccggcgacgttgttttcgcggtcgaaatccaccgatgcgaatccgtgcgtcacgcagctgtagagcgtgaacggcgaccacgaaggcgatgcgaacacgaacgcgtagcaccacggcagcagccatgccagcagaagcgccgcaaggaggattattccggttttaatactctttatcatagatttgtcgttttgcgggttaatcctgacatccctgcttgaaacggtataccgaaagcagcgggaagaacagcgaacataccagcagcagcgccagccacggcagcatgccgtcgtaggcctgcggggtgtcggagaggaagaagatccggcagacgcccacggcgatcagcagattcgccagccgccgtttccatgtgggttcgagacagatccatgccgtcagcaggtagagcgtcagcccggccagataccacggcagcgccgtcagcagaatccgcgcgaccagttcgggcaccagcagggcgtggaagtacccccacagcacggcggtttgcacgatgaacagcaatgccagcgctcccagcccgatgcctgacatcagcagaatcatcttccactgtggaaagggcaggtgaagcgtcagcttcagccgtttctgggccatttcggggacgaactgaaccactgcgagcaatacgcccagcagggccggcaggtattggagaatgtcgatgaagacaacttccttttcgagcatcacctcccagacgtgcgccgcacccttgaaggttatcacccgttggacgcgcagcagcgcataggcggtggctccgaagaggaacaatgcgctcagcggatagaagcagcgcattttgatccactctttgtagaatatggctttgatcataattcgggtttagtattttccggtcagtccgatgaaagcgtcttcgaggttcagcgtttcgccgcgcaggtcgctgcagacaatgcccgcgcgctccagcacgccctgtaccgtcgcaggggagtcgaacgaatagagttcggcgcgcccgttcacgacgctcgggtggtagaggccgtcgccggcggggatcgtgacgtcggcgcccggcgtgaaggtgtatcgccggaacgtgccgagcagttcgccgacgggcatctgtaccagaatgcttccgtaatccatgatgatacagtcgtccacgagcttttccatgtcctgaatgatgtgcgaggtaaggaaaacggtcttctcctcgctctgcgcatagtcgcgcaggtattctacgaataggcggcggtaaccggggtccagtcccatcgagaagtcgtcaagcacgagcagatcggcgttctgggcgagaatcagccctaaggccacctgcgaacgctgtccgcacgacatgcgcgagatgcgctgccggggcgccaccttcagcatttccatcagtccgtaataggcgtcgcggttccagcggggataaaaccgcgcatagaaccgttcgatctgctcgatggtcatgaaggcgtactgcacgtgtccctcgatcagcagggcgatccgggcgcgggtttcgggccgcatcgtgcggatatcctcgccgaagatcagacactgtccggcgcgcggttggagatagccgctcagaatgttgatggtcgtggtttttccggtgccgtttttacccaaaagtccgaggatccgcccgcgcggaacctcgaaactcaggtctttgtatatcagtcgctccccgtaacaatgggtgaggttgcggcattcgatgacagaatcggtcataaagaatggtcgttcttccggcttacttgatcagcgacgccttcgtattggactcgaagtcgttggtcgagttgttcgagtcgatgagtttgccgtcggaaccggtcttgcggatcaccgacttgccgaagcggtcggcatctccgtcggccgtaccgcaccatgcgtaacctgcgtcgagcgaagcgtcccacggggcgatgtagtattcgtcgcggcagcccgtgttcacggcgtcgagcacccattcgttaggcacgcggtagcagttgcgcagcggcatcgtgtagtccgagccgttcggggagtggaagatatactgggcgtctttgagcgggtattcggcgaggaactgctctgcagtcaggccgacgggcggcatggcgatagccacggcgttgaagccgcggttgtggagcacttggaccgtcaatgtcgaagcgtaccatttgtcgaggttgggcacgtcggggttgtcgatatccagatagttctcgttcgacgaaacgtcgtaccactcgaaatcggctttcgtggcgtcccacgagttcgggttgccgatggtgtggttctgggcgttgttgacgacgatcagcgactcgccggctttgaccagcacatcctgtccgttgccgggaatgcagtagaacgcattgcccgcacaacactccttgcggaagtccttgccttcgatcatctcgctgttcatgcccgaattgagtccgctcgaaaggatcagcatcatgccgtcggcatagaggtcttcgtcggagttgttacggatcttgatgtactggtcgcccagccacctgtcaggctttcccgtttcgggaaacgccgtgcctgtgaagtagatctcctcgatcacgaattcgccggcttgcagcgtgatgtcgctctgtttgatggttacggtcgccagaacggtgctcttgccgctccgcgtcacgttcacgacggtcgaacgttccgtccccgtttcgttctcatcgacggacagcaccagcgctttgcccgaagattcggcttcattgatctgaacccacgacgcagcatcggcgggaatattcacgtcgaaattttcctcgggcacgtttaccagcacattgccgccgagcgcgcgcaagatttcggatacgacgacgggattgaccgtttcttcgggatcgtcggtgcaggatgcgaagcccgctgcgaagagggccgtggtgagaattaagaaaagctttttcataattggtttttattattggtttgacaaatattggttcgatcgtttagaacaggatgccgaacgtcgccgtcagaacgtgttcggacaatcctccgctgtaaaaccggggcgtccaccccgcctcggcgaagcaggccagattccggctcaggcggcgttcggcccgcagggacacctcgggggcgacggcccggccgctcagccgcgccgccgtgtaagtcaggtattccgaaatgttgttcagcacgttgctgagcgaaacctcctcgtcgggcgagacgtaacagccgattcctgccgtcgctttcacgcgccactgcggacggagccattctgcgctgccgcgtaccgctccgcagaactgcgcaagccgcatccgccgtgccggataggcgtacgtggccgtggactgccgccattccgcgcggggactgagcatgtaattcaccgtgccgcgccgccattcgacggtcgcttcggcgtcggcgtgccagatacggttcttatacatcgcctgttcatcgacgatgacgctgtgtcccgtacggtcggctatcatttcgatactgcggcgcagttcatagccgcctccggcgcgcaggctccagcggccgctgcggtaggctgcggagagggtcgcctgacgggttttgagccgggttatggggaccgtgttgttggatttgttgagccgctccgtcgtaaggctttcgaatgcggcacgggcataccagcctttcgcgtgccgcggcatgagctgtgccgccagcagacaaccctttccgtcatagccgatgttgaaactctcgctgttcagtgaatagcgggtgtaataactgcccagtccggtcatatacagctcggaagagctggcgccgggcggatagaaaaagtctatgtcctgatcctgtttatagagccgcccctgcaggtccagccccaaaacgtactgagggaactgcatgcctacgccgagtttgatcgtgaaatccgacacgacgttgtggggccgcggatcgacctgacggtattcctgtccggcgcggtagtcgccccggatcgcaaggtcgaagcgtcccacccggtggacatagccgccgccgaaagcatattcctcggtcgagaggtttcctccggcggaatccgccgtgatgcagggatagagcagcaggtagtcggccgtggagttccagcagacgttgcggcggttgccgcggacgtaccgggcgtctgcccacgttgccgaccgctcgctgagccgccggtagctttcggcataaaatcccccgtcgaaggctccgtcgcccagcggctgcagcagcgcctcctgctcacggcgcaggtcgatgcggagcgagatctgcgaaagcgactgttcgctgcggtagagcatcatcgcgggcgactccgtatgaaatccggctacggcccgttcgtcctccgcgctgaaaacggaagaacgctccaatacgccgagcgtatcgcgctgggcggaagcggcggcgggcagcagcgccagtatcgacaggaaaagggccttcatcatcgtcagatcgattttagtaacaacacgatcgattcgctgtcctctacccaagtcattgctactggaatctgattgtaatccgtgcagcgcagaatcttcttttctccggtcgaataggtcgcgtcggcttcgacgatgaacgtgtaaacccctttgcggagccgtattgtcgcgctgttctgttcggcggcgggaaatggcacccgctctccggagttgatattgtcgaagtaggagatgtccgtgcgtatttccagcttttcgacggggcggctgtccggcatcacgaaccggatggacagttcggtgaaaatcgaatcgtctttttcgcaggccgaaaacagcagtgcggagagcagaaacagggtccgtatggtagatttcatcatcatcgcattacagtttgaagttgagttccatgccgaaataggggctggaatagcggcgtaccagtgcgttggtctcgtttctgtacgaaggactgtatgtgaacagccggtttacgaaaatcgcaatgttgagccggtcgcggtaaagccgtttcgagattttgagattgacgttcatactgaaaggcgtgagacggtagagataggcttctttcgatacgttgtcgtggatcatatgctgcaaaataccgtcggctgccgactcggccgtaaacggatgttcctgtaactgcaggtcgaggtagctggtcggcgcaggattgcaccattcggccttcatgccggaaaaccactggcattggaacgacgtggagaaaatcagccccagtttgggaatctgggtgtcgagcaggaaattggtgttgcatacttcgtgaaacgtgttgtcgtcctgatcgtaaagcccgatgtaaggatagggcgtcccttctgcgagctgtacggtcgtcaggacgtactggggttcgctgttctcatagcgggttttgaaataggcgcccgagacgatgagtttcgtggccagcgcccggatgcgccgcgtggagagcgagaattcgatgccctgcttgaatgtgcggcttccgttggtcttgacgccgacggtctggaataccgttttgtccttgtagggaagccattcgagctgcggcggtccggtgaactccatatccttgagcggtccggtgtcgtattcgcggtaggtccgggtgagtacgtcggtcgaggtgcggaatcccgaggtcatattctcccggaaataggttaccgacagtccgtatccgttccactccgcattgccgcgcacctcccatttgaagttccgcgccgccttcaggtcgtaattggtggggtcgtgcttgaagacttccacattgacacggcgtttcgattcgtcgtccgccgggaaatagttgagccgcgtgtaataggagtagtccggttcggggaagagctggtcgagcgtaggcgttttggtgtgccatcccgcgccgcccgcgaatgtgatgcgcatcgggtcgcctgccatgtcgaacgccggaagcgtcaccgagaggttggcacgcggatcgaaatggaatttgccctgcagggtgtaacggcttccgagattggccatggccgtcgtacgcagtccggccattatctcgatccgccactcgccggccgtaatcgtcgtattgtcctccagaaacgccgagagccggtgcagcgccggcagggcgtcgtaacgccgcggatgggaactcatcaggtcggtaaatgggcgcgtcacgtcgtaaagcagaccgccgccgtaatttttcgacatgttccattcggctccgatgcggatcgtgttgcggctcagcggggtgtcggctcccagcagggctaccgccttggcgttggcgtagaacggtttgttgtccacctgcagggtcgcttcatagcggaccggcagcacttccatatcgaagacgccctcttcgactgccgtgcgtatagggacgttgccgctgttcgctcggtaacgccagcggtcgatcaggtcgaattcggaagagacggaagcggaaaaatcgaagctgcggaaaaaattcgcacccttggattcggcggtgaaattcaccgccgcgacgacgttgttgtaactcgatttgtagcgttcgagggggatgcccgccgggccttcgtcgatatcccggtcgcttttttggcggtcgaaagagccggtgtagtcgagcgatccgcccaacgtgtaacggtaggccgaggtgctttcccagcgtttcttcatgcgccacgatccggtcgcacgctggtagttctggcgcgtattgcgcgggtcgtcgtgggagttgagccatgtcgcgccgacgttcatcgtcagcaggtcggccggagcgccccattcgaatcctttgccgacatagagcagctggctgcccagatccgctttgaagcgggcttcgaggttgcggcctccctccttgcgcttgatcttgatcagtccgctggtcagatcgccgtattcgaccgacggaatgccctgctgaatctctaccgaagctatttcatcggtcggcatcgtgcgcatgtcgacgcctctgttcaatgaaatattattgccgacggtcgttcccgaattgtatgtcatgcccgcgtcgttcgacatcggaattccgtccatgacgaacgaaacgccgagcgatgtagtctggtaatcgctgttcgaggtgccgatctcgcgcagatgaatgtggttcgaggagaaaaacgaggggtcggaggcccgtccgccgggcagcagttcgagcaggtccccgaaactcgacggctggatgtggttcatcgcgtcccggccgatatgcacgcccgagaccggtccccgcacttgggtcgccgtgattacgacctcgcggatctgcgtgtcgcttgtccggagccggacggtccgcagcatgtcgctgccgctgacgggccgtacctccatccgttgggagacatatccgatatatgagatatccgcattgtaggtattcgcgggcagggtgaaacgtgcccggccctcctcatcggtcgtcgtcgcgtaggcctttcccccccccgacataggagtcagcgccaccgtagcatacgccagcggattgtgcagggaatcggtaacttcgaacgtgatcccggcgtcgggccggccggactgcccgtacgtgtacgcaggcagcaggataaatagcaaatatttcaggagtagccgcatagttctgttttcacgggacaaaagtatagcgccccggcatatgcggcaatcgccatatcttggtaaattgcattgcaatcatcaccaattaataatgagttgcgttcgtgcggcatcccatcataatgctatccggccgcgccaaaacccctaaaatccggtattgacgatccggtgggaatgctgtttctttgccgtaaaccaaaaacgacgaaattatgactggtatctttttcggcagtacgatgggcacgaccgaggccgtggctgcggatattgccaaacaattgggcgtcgcggacgccgatgtacacaatgtggccgatacgccggccggcgaagtgcagaaatacgacctgctcgtgctgggttcttcgacgtggggcgcaggcgaattgcaggacgactggtacggctttttggatcagctgaaggcgcaggatctgagcggtaaaaaggtggcgcttttcggctgcggcgacagcggttcctatcccgatacgttctgcgatgccgtcgggctgatttacgacggcttgcagcagagcggctgcacgttcgtcggagcctatgcgcccgaagggtatgacgaaacaggttcgctggtctgccgcggcggaaagttcgtgggacttgccgtcgatgaaagcgcgcccgacaagaccgaccggcgggttgccgcatggtgcgaacagattaaaaacgagtaacgatgagcgccgaggagttcagccgttacgattcgatgaagctgttcctgcaccagatttacgagttccagaaaggtgtacggagtctggtgctctgcacgatgtgccgcacctgcgcttctctgctctccgagcggctggaaaggctgggtatcgcttaccggattcagtcggtgaccgacagcaaggtgaatctttacttcggcaaccgcatgtgtctggagaccgtggcgacattcatccacaagccgctcaacgaactctccgccgaggaggatttcatgctcggcgcgatgctcggctacgacatcgccgggcagtgcgaacgttattgcaaacgaaagtctccgggtgtttcatcagaacaagcggcggtcaactgaccgccgcctattccttcctgatctgcgccgtgaacgaatcccccgcgccgacaccgtcggccacttcgacgtgcggcgtggcgacgtacgacatgccgtccggagtgaatacatggcttccgacggcgccgcaggtgagtatcacggtacggagtccgtatttttcgagcaggtcgcggcactgcgcctgtatgccgaacatccggcttacgacggtcaactcctcgtcgtttgttttcagaatattgctgcggcagagcgagtcgtggaccacctccgacgaatagaaatgctgccgcaggttgatgtcgaagatcttataatgtcccgctgcgcaaaaaacggaactgcggaaaagccacagtcccgattctttgccgttgctctccgttattctgtttcgaaatcatgcgacagcttatgtccgttctcatcgacacgcaacgatacgatgtggagatgctgccggtcaatgtccttatgcttgaagacgatataaggctggttgccgtaacccatacgttccatgtattcttgtgtgatctcacggagctgttcgtcggtcaacttgtcttccggcgaggaattcagcgaagcatggaaaaccgtgctggtcgtccttctgttggcttcgaggtacggccggaaactctccatgcaagcgtcgatatccagtcgcccgtgtttgtcgaagggttccaacatcttctgccagaagagcacctcggcttcatccttatccactttttccttgttatagcgcaaggctccgccgggcgaggaacccgaccttatattcgcaaccattccttagcttgtttggcaaggtgcagaatctcgatactaaaggctttcaattccctcgtgcgctgttccaatgcggcgatctgatgcgggatcgcgacgctggaaaagtgagaattgatggctttcacaacttgattatgtaggctaagtacccggcgccttgtcatatttctatgataggtttcccaatactcgcctccgaaccggacgtacaccttccagcgtatccggctctccgctaatattgtcagtctaaaacgttccatgatgtatcttttgatgacagcttccgcaaacggccatagccttacgccgtctggcaatcatcagtttttcccaattctccttgcctttcagttctccgagtttacgcacatggtgcataaccagattatccgtagcaccgcacaactcgcatttccgagctttcagcctgtctataaggcttgtggtgctgacgccgggcattggattcgggcatctgtcaatcgaccgatcataagaaggtctttttcttttgaacccttcattgtataagcgacgttcttttgctttgccgttttttaccgtatacccgactgtaaagactccgttgcgtttgtatttccggcaaattcgtcttactgtggttcggtatttcccggcaaaggttttgtacatactgtactgcatgatgtagtgaaaagtattcagttcagaagcgttgttagctatcgagtaatagttgtaaaaccctctgatctcggcattgtaactgtcaaggatttcaaggtcgtcattattgataagttccgacctatgtttgggaatccattgctcgtgcccgttatgatagctgaatttcagcaccccgagttccagcaattttttctttattacttcggtcgttacctttaatctgaccttgtttccatacacacgggacaggcttccccgtttgttccgtttttgcaggttcgacttgcggacagtcacctcatatccaaggaattttgcaggcttttcagtatgagtgacgagcgttttctcatccgatagttccaatgccagtctgtctgcaaggaaacgctttatatcgtccttgatctttacggcatcttctttactgccgataattccaatgaggaagtcgtcggcatacctcacatatttaagcctcttgaagtttccgtccatagggtcgaagcacggcatcgcggatcgggttttgtctatctctttgagccgtttgacgagcacttttctttctacattatttgtcgctgttttgagttcacgcataaccagcctcttttggtaagtgagaacttcgtattcccgttgctgtcttcccctatctcccttgtcgaatttggaagcatattctttcatgtacttatccagtttgtccaaatagatattggccaatatcggactgataattccaccttgcggcattccgctgtacgtcccatgaaatcgccattgttccagataacccgccctgaggaacttccggataagccgtatggatcgttcgtcggagatacgttccttcaagatgtcgatcagaatatcatgattgacattgtcgaagaaaccttttatatctccttcgatgaaccacttcttacccgtaaaagtcttctgtacggcattcaatgcggtgtggcagctgcgatgcggacggaagccgtgcgaagtatcttcaaagtgaccttcgtaaatagcttccagtaccattcgtactacctcctgcaccagtttgtcgtcgaaagagggtacgccgagaggtcgtgtctttccgtttttcttcgggatgtgtactcttctcgatggctggggagagtagctttcgtctttcaacgaaaggatcagtttctcaatgcggggaaggctcatacggtcgatggtttctccgtctgcaccttgtgtcatattacccggcttggcatatattcgttgataagccaggtaatacatttcctcattgaaaagaatacgataaagcctctcaaacctgtattccgtggtttgactatgctttgtcagactgtttaatactcttgcgggacttctcataatgcctctcgcattttccgttaatcgtattaatgaatattagctgccgcccttcgccgtgtgcgaggctttccctcgctcggactactacggcggctccgttaccataccggatattcatagaccttcgtccaatagccttacggcattccggtttaggtaatccccgtttgcgatataataactatggcgcgacagattgtcggatatgacgtccgccttttactgcttattgcagttgcgtcgtgataagttcttgctctctctgtacaactaccacaatgagagtatcacgatatgacgagtatagttaccttaacgtcacagtttcggaaggtaccgctcaggctgtcattcaatcaatccggattttatcctcatatctgtctttcatcaccccattcagtcgcagtccggtaactaactgacttatggtttaccccgacatgctacactccctgtccggtttccctctcagataagtcggttgatgataggttatttgcaaagaacacttacctaatagcttgccatcactatatttattatatcgccttgacgggcacacagttattccccagcttttgaaattggaaataaaagtcattcagccgggcaataaactgcgtcttcgacgggtcgcgtttgatgacgacaaactcctcggcgaagattcttttgacgataaaacggctccggttatgctccgatcccgccttataaagcatctgcttaaagcggatattctcctccgtggtgagtttgaaattatacctgtggactctgggatctgtcgttgtcgggcgtccgatcctcttttttgaacttgtcatatcgtaggttgtaaggtggcgtgactcgggaacgccacccggcctcgcagagcgagcacctttcgtatgccgaaaattttttcggcatacgaaggtacagctcgctcgcctcaagtgaggcgaaaaatccgcggcggaaaaattttcgaaaaatctatgccaaacctccgctacggcttccgagggtgggtcgtttccctctgcaatattacaaccatgcgggcgtgtcccgtcctgaaaaaggtttacagtgattgataattaaagataaacattttggttcaaaaaatattgtcctgatataagtttacatatgccttccgaacaaccgtctttcggccccaatgatgtttgagtttcccggttctaagttccgcttccaagggcgtaagccaatcgcagct

SEQ ID NO: 6 - RNA, 249681 nt, Alistipes shahii
  source 1..249681: mol_type = genomic RNA
agctgcgattggcttacgcccttggaagcggaacttagaaccgggaaactcaaacatcattggggccgaaagacggttgttcggaaggcatatgtaaacttatatcaggacaatattttttgaaccaaaatgtttatctttaattatcaatcactgtaaacctttttcaggacgggacacgcccgcacggttgtaatattgtaaccgggaaagacccgccctcggaagccgtagcggaggttttcaaagttttcacaaaaaattttccgccgcggatttttgttatcgccagataacagcgagctgtacctttgtccgacaaactaccgtttgtccgacaaaggtcctcgctctgcgaggccgggcgttctccccagtcgaacgccttttgaaccgatattatggataccaaccgaaaacagaccgacatgaccggcaagaagctccgaacaccgagttataaatactctttccggctcaatgaagagcagcatctccgtttcaacgaactgctcacaaaggccggatcggagcataaccggagccggtttattgtcaaaagaatcttcggcgaggagttcgtcgtcgtcaaacgcgacccctcgaaagtgcagttcgtcgcgcggctgaacgacttttacttccagtttcagaagctgggaaacaactataatcagattgtaaaagccgtaaatgcgcacttttccaacatcacgatcccgcatcagatcgccatgttggagcagcggacgcgtgagctgaaagccctcagtatcgagattctgaactttgcaaaacaggctaaggagtggttgcgaatataaggtcgggatcctcgcccggcggggctttacactacaacaaggagaaagtagaccgggatgaagccaaaatcctctattggcagcagatgctggagcccttcgacaaacacggacgaatggatgtcgacgcctgcatggagagtttccggccgtacctcgaagccaaccgcaggacgaccaatacggtattccatgtctcgctgaacccttcgccggaagataaactgaccgacgaacagctccgggaaatcgcaaatgaatacaacatgcagaaaatgggctacggaaatcagccctatattgttttcaaacataaggatatctcgcgcgaacatcttcgcatgaatacgaccgttccatgtccgtattgcgggaattagaacggaaatataatctgcatccgagtatcaaggggcaggaactgacggacagggagagcctgcggaaagtgaattatcccgaggggaatgtcaagcagcaggtatcgtctgtcgtgcggtcgtgtctgcgcaattacaaatgctcctcctatggggagttgcgcacgctgctggagcggttcaatgtctccattgaggaacgcacaggaaccatcgacgggcgaagttatgccggcatcgtctacggagccatgaccgacgacggatacggcgtcggcacgccgttcaagtcgagtaagatcggcaaggacgtaggttatcgggctttgcagaaatactacgagaggtcgaaggctgcattgagagaaaacgatgccctcgggaggttgcggcgagccgttcgggatgccatgagtccgcataatacgcgggacgagttccggcggctgctcaaggccgacaatatagatgctatcttccggatcaatccggtaggcagaatttacggcgtaacgtttatcgaccacaacacgggtatcgtcgccaacggatcgctgctggggaaagagtttcggcgaacgcctttaacgagttatatccggcgccgaaagagatgcaacaggtcgcagaacaacgtccggaacagcgacgagaacaacggagtcacacggcaaatcccatttcgggaatcgtcgatacggtattggatctggccgatgcaagggcttacgaagaacagcaacgccgaatacagcgacgaaaaaaacggagatcacataagtaagggatatagatgtattgaaaattatatgatgtattcacagggttgcatcattcattttaatcacggcatgtctcacattaacgggatgtatgatgtcgagcatcggatatgaagggcgtattttcgatgtcaatgtcgaatctttcgaaaggaagaggaccccctcccgggtattgaaaaaacaggttttgcaggataccgcccgcagaactcgcaagacttgcgaagcgggctttcgttgccgaggccgctgccgtgcgattccgggaatggccgtctgcgcgtcggtcggagagctgatctaccgattttccgattcgatgcggtgcagcacctccgtgcggagaatgcagcttgcggggccttcgcagcggatgcgcagggtgtgcgcgccggtgcgtcggatgctgatgtcgccgtgacgatcaatcgtgcgcagcctgcgcaacgacctgccgggaagcgttacggtgcggtcgcagcgtcgtttgcagtcgatcgccagcacccgttgctctcccgcgagcgcttcgtagcacaacagctccccgtcgtcggcgatcggggaggtgaaccaggtgtagacgccgcgccagtgcagccggtccccctcgtgcaccggctgccgggccagaagccggtggtagctcttgccgtaggagttgccgatgaataccgcgtccgaatcgtcgagccgggcgtggtcgcccgtaccttcgggcagcagccagctcgattgataggcgcggtcgtttttctcgacgaagcgtcggaatgcggggtagtcgcccttggtgaagtgggaaaccgcggcctgcggggtccagtcggcataggctccgtcgggggtgagcgtatgcgtctcgtcgcagaacatcgactgcatgccgtagtaggtgcggatcgtcgccgggacggagttgtggaactcgtgcgatacggctacttcgatgttgttttcccgcacgcggtagcatacccgttcggtgcacagcggggtttgcagttccgctctcccggcggagtctgcgacgggcatccgcgggtcgaagatccggttctccacgcggatcgtcacttcacgggcccgcagcgacgtgtcgcccccgatgcaccggccgtcggcctcgatcgatactccgacgtgccgggccgtgcggacggtgccgccctcccgccaggagtgattcgctccggcccatccgtagccgtcgattcccaggggcccgaggttgtcgctcgtggcccggttgagcacggtttccgtgttccgctcctcgacggcgacttcgtagaaggtgaacagctcgttgaacatgcaccggcggaaggtgtagcggaggttccggccctcggactccgcgaagcggatccgaagctccccgccgcgcagttcgaccgcgagattcgcgccgtcggctttcggacagccggcccgaaaggccgcagcccggctcgtatccttcgatacgggccgggccggggtcgttcgtgccgtcgtcaggagcagcacgagcagcagtgtcgtcgtgcgaaatcgcatcgcggcactactttttcatgtagggtttcatgtaggggcgcagcgtttcgacccaaacggcatagcccggtcccgtaaggtggatgccgtcgtgggtgaattcttcgggcagggcgccgttgttctggatggcgctccagatgtcgatgtagggcagattgcgacgctcggccatctcccgcagcacggcgttgaatccggcgatacgcttgtttttgcccttgaaataatcctgccggtcctcgacgagcggaagcaggctctggatgtagaccttcgtgcgggggctctcccgggcgatgatgtccagcatgcgttcgtactgttcgagcagtttttcgtaggaggtcttcgagaagatcaggtcgttggtccccgccatgatgaacatggccttgggcttgcccgaaaggatggtctccaggcgggcgatcatgcccgatacgcagtcgccgccgatgccgcggttgagcacgtaggccggttggaaatattcgccccacaggccgcgttccgtgaggctgttgcccagcatgacgatgttgtgcttcttgacgggcgtgagttcgtagaaggcacggcgccccgggtagtaggtcttgtcgatgctcagcgtgtcgggttttgctgcggcggtgtccgccatggccgtggcgattacgacggataggaaaagtgcgatttttttcatgtcgtgatgcgtgttgaggttatagggtttctgcggttatcggttgtttttcgtcggaggcggattgtgcggcgcactgctgcagaatccgccacaactggtagagtccgcgcggcacgtggaagcaacccttccatttgccgcccttgagcggcagcagcacctcgccgcggcggttcagatagccgaaccattcgggatactccgcgtccttgaagtgcgaccacatgtactgatcgagcttctcgaaccaggccagacacttgcggttgcccgtgagctggtagcccttgagcatggcgatggccgattcgaggtgcacccaccacagcttctggtcccattcgagctgctgctggggatgccccagacggtccatgaagtagaagatgccgccgtactgtttgtcccagccgtattcgatcgtccgcagggcgatttcgacggcgcggtcgatcagatcgcgccggccgagccgtacgcccatgtccatgacgaaccacatggcttcgagcgagtggcccggattgatcgtgcgaccctcgaatgagtcgacgagcgaattgtcctcagccgagacattctccacgatcagacccaggtccttctggtagaagacgtcgagcacctcgtgcaggcactcgtcgatcgtgcggtcgatcagctgcgggtcgatgaactcctcgatttcgagggccaggttgcacaggatcatcggcagggcgaaatccttgatcgggcgcgttccggcgtgtgccttgcaccatttgtccttggggttgtcgcgcttttcgaggatgcggtcgaacgtgcgtttggcgatctgcgcatactccttgtcgcccgaagccttggccagctgggcgaaggccatcgtggcgaacgtgtaggagaagatgttgtagggctcgatgagcggccgtccgtcgcgcgtgagcgagaaataccagtcgtagttgccgtcgtggccgtatttgcgcaggaactcgccgccctgtcgggcacatttgagccattcgggacgattctccaccttgttgcacaacatcgagaagagccatacctcgcgtccctgcaaccagatgaacttgtccgtatcgtagacgctgccgtcgcgatccaggcaactgaagtagcctccgcactccttgtcctgggagtgctccagccagaagggcaatacgttatcgaaaagttcggattcgtattttttagccagttgttggaaattcatgtttgtccgtatgttttgtgattaattcatccagtatttttcgatctcttcgagcgaccggcccgtcgtttcgggcacggcgcgccacatgatgacgatgtaggggatgcacatcgccgcgaagaggaagaacgtgcctgccggcgtcaggttttcgagcatccacggggtgagctgtccgatcaggtaggtgcccacccagagcgaaagcccggcgatcgacatggctatgccgcgcacccgcgtgggatacatctccgagagcagtacgaagaccacggcgcagatcgacacggcgcagcagaagacatagaataggaagaagacgagcaggaaggcgttcgggagcccccatgccgttccgaagaggaagtagacgccgatgccgatgagcgacagaatcatgcccgaaacaccccagtataccagttgcttgcgacctacgcggtcgatgatcgccagcgcaaggacagtggtgagcatgttcaccgtgccgaccagcacctgcgaaaagagcgagtcgccgctcgacagtccggcattctcgaagatcgtcggtccgtagtagagcacggcgttgacacccatgaactgcccgaggatggcgatgaaggcgccgatggccacggctcgccggatgccgggttcgagcagcgcgcgccattgcggttcgtcgctctttcggaaggtcgcgcgtacggcggcgatctcctgctcggcatcgtgccgggcgggatagatgcggctcagcacggtgcgggcccgctcgtcgctgcctctgagaagcagccaccgcggactctcgggaatgaagaacagcacgaggaagaacagggccgcggggagcgtctcggcgccgaacatgccgcgccacctctccgtgatccagatccgttgcatcgtctcggaggcgtaatgtgccgtctcggccgaacggaggatgccgaaattgaccagataggcggccaggaatccgaccgtgatggccagctggtagagcgacacgagcgacccgcgccagcgtgcgacggcgacttcggagatatacatcggcgatacgatcgacaccacaccgatgcccacgccgccgatgatgcggtagaggatcagttgctgaaagtcggcgcagagggcgcatccgacggccgagaccgtgaacagcacggccgagacgagcatcgtgcgcttgcgcccgaagcggtcgctcatcacgccggcgacggccacgccggcgatcgagccgaccagcgcgcagccgacgaaccatccctgctgcatggcgtcgagtccgaattgcgtcgccacgcctgcgatcgttcccgagatcacggccgtgtcgtagccgaacaggatgcctccgatcgctgcgacgaccgacagaaagacgatataacccgtattggtttgcgttttcataggctactcgatctcgaaatactccttgtaacggtcgtagaggtgcccggcctgcagataggccgactggggcgacatgaagtgcgagaactcgaaggtgatcgccttgtcgtacccggcgcgcttggccgcttcgagcttcagacgcagcttgtcgaacttgatgggcgggaagcggatgggcatgtcgcggtcgaacgactcggcgttggtccagcatttcatgccgtatttgtccgccaggcgcttgttgatcgagaagaagaggtccagctcgtcgtagtcgatatgtccgtcctggaaggcgcaggcgtccaccacgtcgtggatgccgtcgaatatctcgtcccattcgcgttcgtgctcgtcggccgtcacggcgttctgggcgttcgaaacggccttcttgccgtcgatccagggcgagatgaaggtgggcagcccgcccgaaacctccttgcactgcttgcccatcgcgtggaaggccccgatggcaccccgagtcgcgcggctgatctcgccgctgatataccatccgccgaaactgcggtatttctcgccgtagagacgccaaacctcgtcgatgacgtatcggttgtgctccacctcgtgcgacatgtcgtgcgtgtcccagtatttgcccgagtcgtagagcccgaagtagaacttcatgccgtacttctcggccagccgcagatacatgtccaccaagtcgaccgagggcatgtagcacccctgccccagcaggtagggcgaggggtaggtgatgaacttgcggtagcccgagcggatcaggatgaccgtatcgatgccgatggctttcatgtagcggaagtcgcggtcccattcgcgctcgccccagttctgatggggtatgtcgtgcgatatctcgtcgaggaacgtgccggtgatgcgcatggcgtcgcccttggggacgatcagattcgccgcgccggccgcaccttcataggtctcctcctccttgccgcaggatgcgagcagctggggtacgaccagcgccgaagcgccggccgcagccattttcttcaggaattttctgcgtgtttccatctcttttcggggcgtttagtccaggaaccagaattcgtaggtggcgtagcggtaaccgcgtgccttgtagagcggcagcatgaagtcgcgaatgcggcggcgcagcgtgtcgatgtcggtcttttcgctgctccaggcgatctcggccgcagccgagagacgcggcagcagcatgtgctgcacgtggccgaagtcggcgatgtactcggtccagaggttggcctgcacgcccttgatatgcgcacgctcctcttcgttgagcccggcgaaggggtcgaacgagtagcatttttcgagcgtcagaccgctgtcgatggccagcggctcgccgtagacggcctggtcgcgcgtctgcgaatagtcgaggtagaggtactggtagggcaccatgatcgcgtcgttgccctgcttggctgccgcgatgccgccctcggcgccgcgccacgacatgaccgtcgccgtcggcgtcacgccgccttccagaatttcgtcccagccgatgatcttgcggcccttggcgttgaggtatttctcgatgcgggccaccaggtagctctgcagctgcgcttccttttcgagtccgagctccttcatgcgcttctggcagtggggacaggtcttccagctgtcgcgcggcgcttcgtcgccgccgatgtggatgtattcgcccgggaagaggtcgcagacttcgtccagaacgttctgcaggaattcgaacgtcgtctccttgcccacgcagaagatatccttgttcacgccccaactggtccatacctcgtaaccttcgccgcggcatccgagccacggatagctggccagtgccgctacggcgtggcccggcatctcgatctcggggatgatcgtgatctgacgctcggcggcataggccacgatgtcgcggatctcgtcctgcgtgtagtagccgccgtggggcgtgccgtcgtatttgcccgtgtgggcgtagaggtgtccgacgtaggtttcggggcgctgcgaaccgatgcgcgtcagctcgggatatttcttgatctcgatgcgccagccctgatcctcggtcagatgccagtggaaggtattgatcttatgggcgctgatgatgtcgatataggtcttcacctcgtcggtggtgaagaagtggcggccgcagtcgaggtgggcgccgcggtaggcgaagcgcggagcgtcctcgatgcgcagggccggaatgcgcatctgcgcggggttctcggtcgcggcgacgagcagctgttcgagggtctgcaggccccaccatacgcccttcaccgagccgcctgcgagcaggatctcctccttgtcggaggtgctgtcgagcgtgtatccctcttcggccagcgcggggtcgatgctcagcttcacggtggccttgcgcagcgatttggccgtgctcaggccggagaatccgtctcgttcgaggcggctgacgaacaagtcggccagacggagcaattccgcgtcgttgctgccgatgacgacactctgcggcagatcgatcgtgcgtccggtctcccggacgtttaccggtttgggaatgatgcccgtctgggcatggacacgttcttgcaggaggatgcctgccaggagcagtaaggttgccaatgcgatacgtttcatagctatggggtttttcgatttgggttttatatcggttgtatccggagttattccaactcccggaatgaaatggcgaatccgccgccgggggccaggtacattttcagccgggtgcggctgtcgaccttgcgacgggtgacggtgtatgcctgcgggttggtgcggtagtgggcatcgggggcgtcggcgtagatcgtcgcctcgtacttgcggcccttttcgagaaagtcgagggatacgtcgagcgtccgggcgttttcgtcggtcacgcctgcggcgaaccactgtccgctctgcttggcctgccgcgccacgacgatatagtcgcccggctcggccgccaggtagcggctgcggcgccagtctgcggctacgtccttgatgaactggaaggcatcgggatagcgcaggtagtgttcaggcagatcggcggccatctgcagcggcgaatacatcgtcaggtagagcgccagctggttggcgatcgtcgcgttgacgcacgaggggttcgcggggctgaattcggccatgcgcatgacgaagattccgggcgtgtagtccatcgggccgccgttgagccgcgtgaagggcaggatggtgacgtggtgaggccggatgccgccgaaggcctggtattcggtgcccttggccgactcgttgccgatcatgttgggataggtgcggcacagtccggtggggcgcacggcttcgtgggcgttgaccatgatcttatgctcggccgccttgcggatggcgtagaggtagtggttgttcatccactgtccgtagtggtgctcgccgcgggggaagatgctgccgacgtagccgctcttgacggcgtcgtagccgtggcgctccatcaggtcgtaggcccggtccatctgccgttcgtagttgcgtacggccgacgaggtttcgtggtgcatcatcagcctcacgcccttcgagcgggcgtattcgctcagtgccggaaggtcgaaatcgggatagggaatcacgaagtcgaaaacctcctccttgttgaagagctcccaatcctcccagccgatgttccagccctcgaccagtacttcgtcgaatccgtgctcggctgcgaagtcgatgtagcggcgcacgttggccgtgttggccgagtggcggggcgagggacggcaggccgtgtagtcggttttgcccggacgtacggacgtaacgtcctcggtgtaggcccacgatcccttgccgctgatcatctcccaccagacgccgacgtacttcaccggatggatccacgacgtgtcctcgtaggcgcacggatcgttgaggttcagtaccaagcgcgaggcgaggatgccgcaggcgtcgtccgccacctggatcgtccgccagggggtgtggcgcggcgtctgcatcgtgcccttccatcccgaggcgtcgggtgtgagcgaggcggtgaagaccagccgttcggggtcgatctccaggtgcatgcacgggtagtcgaccagcgccgcttcgtggaggttgatgtagagcccgtcgtcggtacgcatctgcaacgaggtctgcaccgcgttgacgctgtagggcgtgtggtagggattcgaggtcagagccgacggcagcagcgcgggaatttcggacagacgcgattcggtgtattcgtactcctgggtgtcgtagtcgcccggaatccagaaggccttgtggtcgcccgccatggcgaactgcgtgagctcctccttgatgatgaaatattcgaatccgcgcatggccgggaattcgtagcggaatcccagtccgtcgtcgtagagccggaagcggaccgacatcggacgcccggtgccccgctgccgcaggtcgaccaccagttcgttgtaatggttgcggatctcggcctcctcgccccatacgggctgccaggtctcgtccagagagctgcggcggttgtcggtcagttcgaaatcgtcgtgcagcgagacgctggggtgttcgtcgcgtttgcggatgacgccctgttcgatctcgatcttcgagacgttcagatcgccgcgcagttcgaatcccaggtcgctgggcaggatcacctgccggccgtcgtagtcgagtgcatagcggggcgttcccgtcggcgagagcgtgaaggtcatctgcagcctcccgtccggggagagcagccgttcctgcggctgggcgccgtgtgccgccgttgcgagaagcagtgcggccaaagccggaatcattcgcttcatgatggtcatcgtattatcggtagaggggtgaaatgacgaactcgaaggtgtaggcgtcggccggaatccggtactcgggacgcggcagcgatccgaacgagtcgatacatcccagaccgcgctgtacgaggtcgaagttcaggtgcgtcacgccgcgcgaacggtccgcttcgtgggctgcaggccgcagctcctcggagtgcgagtagcgcgaggatacggacgagagctcctcgctggcgaaaggcgacgaaaagtcggtcaggtcctggcgcgtgaaaggcagcgccgaggccgagaactgcgcgggcgaggtgatttccagtccgtagccgctgtcgtccgtcaggcggaaccatttcagtcccacgtgcgtacccgactcctgcgggtgtacgtatccgtagtggtattgctccgcgaccgactgcacgtagtggcccgttcgggcggaactctggcggtcggagtaggtctcgtaaggacctttgccgtagaaatccaccgtcgagtatcgacccgggagggtcgtctccatgcctacgcggaagaattcgggtgccgaggccatgtcgccgccgtcgaaggtgcggagcgttccgacgagcgtcccgtcggcgtggatgcgataacaggtttctacgcgaaccatgccgtagagcggttcgaataccgttttcacttcggcgtagtcatccgtcgtcgtgacttcgaacgattcgggtacgaattgaggagcgggccacagggccatctggcggctgaagatgcgggcgccggccggatggtactggaatccgacgtcgttgtccgtcacagcgcggctgaagcagggcagcagcggtgcggcgagcagttcgcgaccggccagacggtagctgctcagggcccccgtcgtgcggtcgaaagcgatcgcccaggggagctgcgcacgatcatccgtcgttcccgacaataccgtcgtcgcccccgtcatttcgacggcgggtgttcccggaacgatcttgcggccgtagcgcagcccctgtgcgatggcaatttggtcgtgcgccagctccgtaccggccggaagcagtccgtcgcggcttttgagcgtgtagcgtacgtcgaggaagatatccgatctttcgaggtcggggcaggctgccgccagctcctcgcgggtatatcccgggcgcagcgtcgcggtcgtctgcggagctacgtcgaggggcgccagggtacccgacaggacggactcgccgttgcaggtcacctcccactgcatcgcgtagcgcgagagatcggtaaagaaatattcgttgtagaccttcacccgtccttcgagcgcctcctcgggggtggcggaggtgcggatcgactgcaactgataggccacctcgtgggcatggggatgcagcgaccggtcgctggcgatgatgccgttgcagttgaacgatccgtcgctggggtcgtagtcgttgtagtcgccgccgaaggcgaagatatggtcggtgccgtaaatggcgggatcgaccggacggtagagcgcctgatcgacgaaatcccagatgcagcccccctggaaggcgggatatttgcgcacgaggtcccaatactctttgaacccgcccatcgaattgcccatcgcgtgggcgtattcgcacagaatcatcggccgcgagggattcgatgcggcgtattgctcgcatccttcgtagccgcggtacatcgggcagaagatgtcggtgttgcgctccagcacggcccgctcgtattgcacgggacgcgtcgggtcctcctgtttcaaccagtcgtaggccttttcgaagttggggccgttgcccgcttcgttacccagactccagacgatgatgctcgggtggttgcggtcgcgctgcaccatgcgcgtgacgcgctggagatgcgccgcttcgtaggcgggatccttggcaagcgtctgttcgtcgtaacccatgccgtgcgattcgatgttggcttcgtcgatcacgtaaaggccgtagcggtcgcagaggtcgtaccagcgcggatcgttggggtagtggcacgtgcgcacggtgttgatattgagccgcttcatgatttcgatatcgcggatcatctcctcctcggagaccacataaccgcggtaggggttcatttcgtggcggttcgcgcctttgatgagcaccggacgtccgttgaccagcagctgtccgccggagatgctaacgtcgcggaagccgatgtcgagcttcgtgcgctcggtgaccgatttcccgtccgacggggcgacctccatgcggtagagccgcggggtctcggccgaccagggttcgatgccgctcagcgatgccgtgccgccgaagcgcttcaggccgtcgcgcgtcgcgtcgcagacggtggcctgcgtcttgtatcccagctcggggatggagacctcgaccgatttcacgccccgggtcgtcacgacctcccagcgcagttcgcccgaggcggaggcctcgacgcggatatcctccacgtgctgcttttcgcgggccgtgaggtaggtctcgcgggccaggccgctcagacgccagaaatcctgatcttcaaggtaggagccgtcgcaccagcggaagatttcaagggcgatgcggttctcggcgcccggaacgaccagacgcgtgacgtcgaagcgggcttcgagcttgctgtcctcgctgtagcccgcctggcggccgttgatccagacacgcacgttcgaggtcgccgagccgatgtggagcacgatctgcttcccggaccacgaggccggaaggtcgaacgtgcgcacgtagtggcccacgcggttgtgctccgtggggacgtagggcgggttgttctcgtaatggccgcgccaggcgtagccgatgttcagatagaccggatcgccgaacccgttgagctcccacatgccgggaaccggcatttcgccccaggcggaggtatccgtatcgggtgcgtagaagtcgggcgtgcgctcgtcgggcgtttcgtagcctttgaatttccagagtccgtgcagcgacagacgcggcgcgtcggtgcggaatgtggcccgcatcggcaggcggttgtgttcgttgacggccggattctgccagtcggggtcggtttgtcgggcggcggcgtgcgctcccggggccggaatgccgagcagggcggctcctgcggcgattgtcgtcagaaagcgaagggagactttcatcgtcggtcggattgtacggttatttcttgatcttgacttttttgccggctacgacttcgcgcatgccgatcttttcgagcacctcgcgggcctgcatcgggttgtcggtcgtgagctggtcgacgcccatcttgaagagcgtctccatctgtgcgggatcgttgaccgtccaggtgttgatgctcatgcccagtttgcgtgcttcgggataccatgtcgcatcgtcgagcagcgtcttgaaccaggtgtccacgccgttcatacccatttcggctgcctgtgccggacggcggtcgctgcccagatactgcaccgtgaatcccggggccgactgtgccagcacgcggctggcgttgggcgagaacgagatgaagatcacgtgtttgggcgagaagagtttgtattttttcagtttctcgatgctcagtgcgatggcgcggttctcgatctcgtccgtcgagtgccatttcatctcgaagaccagcaccgttttggggtatttcttcgcctgagccaggtattgatcgagcgtcgggatcggttcgccgttctccagccggtagtccttgaactcggcgtagggggtctggtcgatgcgtttgccgtcgatatgtgcgtcatggaagatcagcagttcgccgtccgaggtcatgttgacgtcgaattcgctgccccagaaaccggctttctgggcgctttcgagtgcggccagcgagttgcgggcgtagccgccctccttgcagttccagtagccgcggtgggctacgatggcggactctttgggttgggcctgaacgaaggttacggtcgctgcggcgaatgcgacgctcagcagcgttttggcgatggatgcggttttcatatcggattacattttagaggctttgtaagtcatgttgatgatgcgggtgggttcgacggccgtgatgcggaacgtgggagcctgctcgatgaagtaggagctccaccacatcgaacgttcgccgtccgaggcgaattccgtgtggatgtagtcgcccatttcgacgcggattttcccttcgaagcggacatgcaggctgccgcccgagaggaactccgacggaagttcgacgccgggtgcgacgctctggccggcgtcgaggcagagcacggcctcgcgctcggtgccgtcggttcggaaatcgtcgaaacggaggtcggccgtcaggttgcacaggttgccgttgtcgatctcgttgatgtcccagcccgaggccgagaagtcgaagcccatgtcgagcagcttctggttgttctgcggcggttcgtagcatcctgcgtagccgacgtagcatccgacattgtgcacctcgcgggcgatcgtccgcagctgttcgtcggtgaaatctcttacgttgcccatgcagtagaggtagggtgcgcccatgtatttgcagcggtctacgatctgtcggatgctcttgtaggtgtggtattcgagaatggggcccgagaactcctcgcgcgtaccccagtagaggatgaaattctcgcccatgatcgagcggatgatgcgcacctgctcctcgtcgacgtgcgagatcatcggtgcgatgttgttgcggcggcattccagcaggaactcctccatcgaggtgatgtgcgtgcggtatttggcgtagcgcgagcggtagcggtatttgctcatcagcgtgtcgaagggcgtctggcggatcaccacgtcggcggccgaattgccgtcgaggtcggtgacctggtcgcccagacatcctctgacgccgtgcatgacgatgtatttgccgggtgtcgccgtggcgtggacgttggcttcgatgaacttgaagcccaggcgcgcggcgatctgcacgtcgaagaccgactggcaggggatgatcggatcgctcttggcgtagatcttgtcgatgaacaggtggctgtaatagggaccgccgaaccggaaggtccagttggcgttcacggcgctcgacgtattcatgcggatgcgctgttcgacggcgggtgcgagcccggaggcggtctgcgccgaggtcgtgatcgtcgccgtcacggctgccgtcgtcagggcgacgagcggcagcatgcggcggatatgtgcgaaaggtttcatcgttcgggtcaatgttcgttcggagtcggggagtcggttaacgtttttcggcgttctgctgcgtgcggcaggggcgcttcgacacgaagtcgcagaaatcctggtagagttcctgatcttcggggtcgtccgagcggcggagtgcagtcacggcgctgccgccctggtagtaggccagtttgcagcgctcccatacgcccgtctcgcggaaggcccgcatgtagtcgcgcagacgccctccgcggccgtgcttcttgagcgccgactcgtcgaattcgacctccatgtccatgccgttggcctgggcctcggcgcaggcgaccttcagccgctcgtagggaatctcgttgtggaagaagtggttgggctggtagtaggcgcgggcgaatcccttctccttccagctttcgaagccgggggcgtggaagtagggtatccagtagaggtcgtaacgcttctgggcgcagtagtcgacgatgtttccgatgagcggactcttggccgaggtctcctcggtcacccagtagaatccggccagttcgacatgccggaacttggcctgcttgaagcggctcagcacttggtcgatataccagcggcaggccagtgcgcggtcggcttcgtccgaaaagtccaatacgcggttgtcgatgacgccccagtaggtcgtgccgcccttttgggcgatcggctgcttgtagacgatcgggttggggatcgagacgacgatctgccgtttcgagggcggaacgccgagcgtctgcgacgcctcctcgacggaacgttcgatggcgtcgatcacctggccttcggagaagtagtagtcgatcagtttgagccaatcggcctgcgtggcggccgggaggatcgaaccgtcttcgttcttgtgtcccgggtcgaaggccacttcggcgctgccggggccgatatcgcggatttcgagcagcaggaacccgtcgaagagccagtgcgccttgccgtcgcggtcggtgtaggagacgtagtctttcatgcggtcgacgctccagttgcggttgcgggcgcctccggcatagatcaacaccatgtccgaggccgtgcaggttttggttttgcgggcggtctgtgccgaggtcggcagcacgcaggccagtgccgccagtgataacaggatgtgtcggatgggtttcatgagctttcgttattttttgcggaagaatccgatggtggactttacggcgcggttttcgtccgaatggtagttgacgtgctgcgtgccgaccatcatgccggtcgaaccgccgccgtcgagattcagggcgtccgtacagccgatgccgcgcaggatgcgggccagctgggtgagcgtcgccccgccgctggccgcgatacggccgtcgcagatgaacagcacgacgcgtccgtctgccaggtgtcctacggccgtgcggtcgggcgaaaccgtcgggccgaagatgtcgtaggggatgatttcgtagttgttcaggtagtattccgtgcccttctccgtcagggtgaaatcgaacggacacttgccgtccttgagcagcacgggacccgcgctgatggcgtagtggggcgaccagccgaggggtttggccgggttggacgtcgagacgcccgcgtatttcgcttcgccgcgcacggagggcagcggtcggtcgtagtagtagttcgaaccgttggttccggtccagtaaacaccgggtttgccgtcggcgccgactccgaagatgccgcgcgtggcgtggtacatcacctgatactcggcgtcctgcgtgcggagcgaaccgcgcatgtcggggatgtaaccgatcgagcgcgaatcgacgacggcgatgcccacgtggtccgacgagtagaagtatccggcgttggtcatcacgtagcagtcgccgccgaacgaggcggactgcttgtcgatggtggccttggcgtcgggaacgcttacgcgcagttcgaccgatcccgtgacgtcggccacggcataccaggcgtggaaattgtgtccgccgaccttgtcggtcgtctcgtagaccgagatttcggacggaagcgtcggcatgtcgagttttttccaagtcagtttgatcgcttcgggctccgtgccgagcgatgcgacgatctcgtcgctgtagtaggtcttgttgtcggcccgtacgtaggcgcggaaacgatacggccggccgtattcgagcagtacgttcgagatcacctgcatgacgggctgcgtgccgtcgagtgccgggccgtcctgccgcatgtcctcgacggtgggcgtatggtcggcgctccagcagatgccgcacgagacgttgcgcgcctgggccgtattgcggggtgcgtaacggaaggcgatgcacgattcggtcgcggtgctctcgcccacgaaggcgatgccgggcgaggtgaggtcctccaattcgagggccggggcgtagacgatctccgacgaacccttgcgaccgtcggcgcagacgccgaaacggtaggttttgtccagttcgagaccgctgtcgaccgtgtagctctccacgttgcgggccgtgaatccgattttgcagggcgaagtctcgtcgccggtgcgcatccagaccgtgaatccgttctccgaatcgctcttgtcgtgccacgtgacgcggactttcgtgtcgccgatccgttcggccgcgacatcggacggaggcgtcagcgtcgattggggcgtctgcccgccctccgattccgagcaggcggcgagcatcgccgtggccagaaccgtgaataagagccgtcgtatcatctttttcgcttgtttttgaatgaaattctttcttgtcgatttacggaaggaataaccgacccgtacagccggttactccttttcccgaatattttgtcggcgaaccgattattcgtaggctacgagcgtcgcttcgctgagcgtcatccagtggatacgtcccgtccaccattggttaagctcggttttgccaacggcataaccgttcttctgcatcttgaagcggtagtagcgggctacgatctcgttatcctcggggataacgaccgtgataccgtcggccagcagcgcagagtaggctcctgctgcgacccctttcatatcttcatagagatgcgaggcgtctacgctgccgagtttcacccacttgtcccaggctgcttcgggctctccgtcgccggtgtaagcgtagatctcgtatgccagcgggtcgttgttcgcccagctccagtagggatagctgatgaagcgagccagacgaatggcttcaccggcgtcgatcgtgaacgagtcgccgtgtcctgcattgaacgaatctacggtagtattgatctcccagtgcttgtagttgaagtcggccccttcgatgttgcacaggtggtagttacccttgttggtctgccacatgccgtcgaacaggtaggcactgccgtggttcttttcggccgtattttctgtgccgtcgttctccagcgtgaaggcgcgcatcttcgacttgtcgggcagatacgtggaagcctcgaacgagatgggctgtacctccatcgagaacgtcaggttggcgtacgaaggcgacgagaaagtgatcttggccttcttgttcgcgttgacgaggttggtcggaatcatgtcgaagatgatctccgtagccgttttcgatgcctcgcgcatccatgcgccgtcggtgatcgtgtaggtccagtcgtcgatgttcgaggtgaccttcacggtgtactgttcgccgcgttttaccgttacggactcttcgcccgaagcggtcagttcggcgaagttgagcggacgtacctcgacggtcttttcgaagacggggtcggagggcgacgtgaaggtgatcttggccgtgacgttcgtgtcgaacttcaccgaaggatcgaggtcgaagacgagttcctcctccgatttcgaagcctccttgagccatgcgccgtcggcgagcgtatagacccagtcctcgacgttagccgcgatcttgagggtcagctgctcgcccttcttcaccaggacggtctgtgccgccgtgatatccatttcggctacgtaggcgggctgcgatacgggaacgcgctcgatcgagccgtcggccgaagtgaactccagcgtcgaggtgcgctcggcacccgttacgttgcggtcgacaccgagtttgagcgtcgttttgccgcttccgtgcttgggcgtaattttgaaccagggatcggaaacggtgagggtccagttcgaattcgagttcaccacgaagtcgatgatgcttgcgtccgccgaaagctcgatcgattcgggaacgcctatgtaggccgcctcgtcgttctcgcatgccgtgacgcagagcgctgcgatggccagcagaagcattttgaaggttttcatagtgtatcaggtgtttttttattcgttgtaaatttcttttgccgctcggcgatgatcttcgccaggcgctcgtaaaaggcccgttcttcggtgatgccgttcttccagtattcgaacgaggtgccgccgtagtaggccagattcgatttttcgagaattccgagctcttcgtagacgtcgatgtaggccacgttgcgctcgaatgcgtaattcgagtcgaactccacctccagccccatgtcggccgacagcgcttcggcgcaggcgtcgtagagccgctgccggggaatcgtggtgctgaagcagtagttgggctggtagtaggcgtagtcgaaaccgtattttttccagtcggcatggccgaaggcgccgtagtagggaatccagcggtagtcgaggttcttcgagtggatgtattcggcgacctgcttcatgtaggtcgagatgaatcctccgtgctcggggaaccagtagatgccggcgagctggatgttgcggaagtcgtgttgtgcgaatttctcgacgaccatgtcgacataccatttgcaggcggctatgcggtccggatagttgctgaaatccatcgctttgccgtcgatctcgccccagtcggtctgaccctcctgcggttcgggcatgaagatcacgaccttgcggcggtggaacgtacctccgatctggtcccgcaacgctccgacggctctgtcgagcgccgggatcgagtgcgtatcttcgaggtagaaatccacgatggcttcccagtcctgcttgttcgaagccgggcggttgagtcctccgctgaatgatttgcctccgcggtgtgccgtcagaaacagatatccgtcgaagagccattgcggagcgtcgtcgtccgaagccgcgtatttggcgaaacgcttgtcgtcgaatgcgcgtccgtcgtcgtatccgtcgtagatcagcatcaggtcgcggatcggcgcccggccgatcgtctcgccgaaattctgacgtacgggaatctccacccggaccttcggatcggtcgtcgtgaagacgatcgtgccgctgcggacctcgcggcccgtgttcacctcgatggctacttcggctgtcgccgcggaggtcgcttcgacatggagccacgcggcggcattgcctgccgaaacctcccatttgacgttgctgcgaacgacgagcgtctgcgcgaaggcggcgaacgactgttcgtacgactcgaccggggcgccgttgcgcgtcgttacggtgaggtagttctcctcttcgacgggcttttcgggctcgggctttccgggctgaggattttcctcgcccgagtgtccgcatgcgctcagcagaacgcatgcgaacatcatcgaacgtgctatgatctgtttcggaatcatcgtgtagtcgctactcttccgtattgtatctccagagctctacttccgagagcgcgaagtagttgatacgtcccgaccagtattggttcatggccgtaccgaaggccgcatagaagttcttcagcatcttgaagcggtagtagcgggcctcgggcagttcgccgtatttgaattccacgaccgtaccgttgaccgtgaggtcgttttccgaacctgcttcggcgttcttggtgatctgccacttgtcggagtcgtccacttcgagaatcttctcccagttggtccattcgccggtctgtgcgggttcgcccgaaagcgtgtaggcatagagctcgtaaacggccggctgctggttctcgtagggccagtaaggccagaagacgatcttcgaaaggcgcatcggctcgcccgcgtcgaacgtgaaggagttgccgcgttcgggggtcttgctcggatttgccatcatccagccgaagtggttataggccacttcgccgtaagcgcccttcttcgacatgtgcttgccgtcgaagcaacggctgggatcgacctccttggtccgttgatagtcggcgtccgtgtcgagctgcaggaccgtgcactgcgtgtggtcgacctgcataatctgggcgcgcgaggcggcgatcgtgtaggtgaagtcctcttcgaggttattcatcacgaacgaatagggagccgacaggttgagtttctgcccctcttccggtgcgccctccttgcggatggcgcgggtggcgtattcgagcgttacggcgacgtcggagaagttcgaattgttgacgaatacgaactgtatctcgtgggtcgcgttgtcgaccgtgccgacgaccgtctccgaaccgcaggtggccgtagccgacttcaccagggtcgaaagggcgtgcgtggggatgaattccgagaattcagcatcggtattgcaggaggtaaccataccggctgcaagaatgatgaatgacaatattctgtttttcattgctttgtcgtgttaaaaaccattaccatccggggttctggaccagagcggggctcttgtcggtctcgctctgcgggatggggaacaaatagtaggctttcttgaatacgcgctgctcgaaagcgacgggctcgtagaactcggtcgacttgaagttgttggtcttcgggtcgccgccgcgaacggagaggccccatacggaacctgcatcgccgtatttgtcggtgcgggctttggctacggtctccgagagcagacgacggcgcgtggtgtagtagcggtcgccctcgaagttgagctcgatctgacgctcgcgcaggatgtactcgcgctgatccttctgtttgcccttgatgtcgggataggtcgcgaagatgctcggcagaccggcgcgcttgcggatgtcgtcccagtacttctggatgtcggggttggtcggatcgtactcgttcagagcctcgatgtagtcgagcaggatctgcgcgtagcggatgtagatcgatacgtattttccgggcagcgtcatacgcgtgtagaagtcggcttcggcaacgacgcgcttctgggtgaggaagcccgtcatcgagtagttgagactctgacctgagttggacttaccgccgaagtagagctcgcaacggccccagccgtcctgttgcgaagcgtacatgttgaatccgttgcggtgacctgcgtcgtccgaataagggagctgtacgcggtggttgtagttgatcgaggcgtagaaacgcggctcgcggttgcagaacatgttccagtcgccctcggcatgcccccaggcgtcgaggttcttcaggtcgcggatctgcgtcttgcggccggcttcggtcttcatatccacgccgctgaagttgtagtgttcgccgtccttggtggcgaaaccgcgctcgatgtaacccgagttgggatcttcgatcgtgcggccgttctccatgtagaaggcgtcgaccagacgcagcgtgggacctacggcacccatacaggtggccgaaccggcaccctcgggaatcgtgtggaccatccaggcgtaacgctcgccgtggttatcccacgagatggtgccctggtcgatcgaaccgaagatgatctccgagttccagccgttgttgaagaggttgtagtaggatttgtaggggttgaaatccttcgaatccacgcctacgtcgccgttggtgtagagcttgatgttggtagcctcggccttgtcgatcacggcccggtatgcttcggcggccgtctcccaacgcttcgaatcggcggtggtgctggccagatgcgtgccgtcgtggttcacgaagtcggcgtagtcggggttgccgttccactggggcgaagcctgcagcatgagcatcatggccttgacggagagcgctgcggctgccgtcgcgcggcccaggttgtccgcctcggaggcgtaggagtcgggcagcagccgttcggcgcggtccatcagttcgcagacgtaggcggcgcactcgtcgaacggcgagcggggcatgttgccgaagtcggtgtcgttgctcatctgctgtttgatcagcacgaccgggccgtactggcgcagcagcaggaagtagtagtaaccgcgcaggaagagcgcttcgcccaggtagcggtccttgaggtcctgcgacaggttgccgcatttacccacgttgttttcgaaaacgaacgtcgcacggatggtccggtagaaggtgttccatttgacatagaaagatgtcgaaggctcccagacaccgaggttgatgttgtaggtcgggtatacggaccacggaatgtcgcactcgtcggcgcatcccagccaggggtcgtcctggtgcaaacggtccatgggcagcgacgcgtagcagttcgtgagatacttcacgacctcggcgcggttgctccagaccattttgtcggtcttcatgtcgtcgggttctttgtcgagatactcgcaacccgcgaacattgcagtagctataagcagataaaatatttttttcatcgttcgtcggttttagattagaaggagattctcacgccgaggttgaacttgcgggccagcgggtagttgctaccgttggtcgagccgctctcgggatcccacatgtcccagggcgagaagagcagcaggttgctgcctacgaagtagacgcgcagcgactggcatccccacgacttgaggtgcttgccccggaaggtgtaacccacttcgaggtccgaaagacgcagcaggctgccgtcgtagatcgtacgcgtggaggccttctggttgttggccgaggcgcttgccgacagacgcggatagaacgcgttggggttgggattctcctccgaccagcggtccatcgccttggcgaagaggttgcccttgcccacgccgttggcgaaggggaagaacgatcctccgagcgagtagctgacgtgtgcctgaccgcggaagaaggcgccgaaatcgagacccttccagttgatctgcagaccgaaaccgtagttgatttccggaacgcgcgaatagccgatggccacttcgtcgtgtgcgtcgaccacgccgtcgccgttgtagtcgaggtatttcacgtcacccggacgtaccgtaccgaatttctgctcggggctcaggtcgatttcgtcctggtcttcgaacagacctagggcgatcagaccgaactgctggttgagcgggtgtcccgtgcgcatgcgccagggatcggtcggagcctcgtccttctcggtgatcttgttgcgggcgaaggagaagttaccgtagatgcggtagttgaccttgccgatatggtggttgaattcggccgtagcctcgaaaccgtggttggtcatgcgacccatgttggccagcggctgctggttaagaccggcgatgcccggaaccgacgaacgctggatgaggatatcccaacgcttctcgtggaagtagtccagatcgatcgataccatcgagtcgaacatcttcagctccagaccgaggtccttcttgagacccttctcccaggtcagacccagaacgccttcctgtgcctcgccgatacctgcggaccacgtggcgttgggaccgaagtagtggcctcccagacccgattcccaggtgctcaggtaggcgaaacgacctgcggccagtacgtcggaaccgaccagaccgatcgatccgcggatcttcaggtggttgatccacttcaccttccagaagggctcgttcgaaatcaggtaaccgatggcacctgcggggaatacgccgaagcgctcgcccgacttgaagttctccgaaccgttgtaacccatgttgtactcgatgaagtagcggtcgtcgtaagaataggtggcgcggaatgccagaccctgcttgcgatagggcagtgcgaggatcgagctgccggcggccaggttgttgaagctgcgctggtagtacatggccatggcgcctacgcggtgccgctcgttgaagacgcgctcgtagttgaactgcgccttgaactcgtcggcacggtcgcccgtgttgctgtagatgtaaccgaggaactcgtcgccttcgcgcttgggaacgagcgagtagagacccgtctcgtcgtcgacgccgttcacggcgtagagcgacgaatacttgccgcgcgactggatcgaaacggtgttgacgtcgtaggagaacgatgccgtgaagtcgaggcccttggtcaggaagtccagattctgcttgagaatgatctggctcatgaccgacgtgcggtaggtcttgttgtaacccgaaccgaagagtcgctcggcggggttacccacgctggtcgacagcggcgcaccccagccccactgcatctcgccgaattcgttgtaaccgagcggaacgcgaacgggcgtggtgatggggtcctgctgataacatgccgagaagagctcggaggcctgcgactggaaattgtagctggaggtgatcggacgcggctggtgggcgtcggtcatgttggcaccgatttcgagcgacagggtcgtcgtcttggtgagcgacatgtcgatgttcgagcggaagttgtagcgcgtgatgttgatgttggtgttgtaatccgtgtcgggattgttgtagaggttaccgttgtcgcgcaggtagcttgccgtcacgtagtagcgggcgcgctcgccaccgccgcgtacgttgaccgaaacctgcgagttggtggagaatttcgtgaagagctcgtcgaaccagttgacattgggatagaggtagggatcggcatgggtttcggtcatgcggatctgctcgggcgaatagaattcgctgccgtaggcctcgttgtagaggcgcatgtagttggcgccgtcgagcagtttgggcatgttcaccaggttcgatataccgctctcgatcttcacgtcgatggtcgccttctgggcgatacccttgcgcgtggtcacgagcacgacgccgttggcggcacgtacgccgtaaacggccgtcgccgatgcgtccttgagcaccgagatggtctcgatctcctcgatcgacaggtcggacatcgaacgctccacaccgtccaccagtaccagcggggcgctcgaattgagcgacgagataccgcggatccagaattcggcgttgtccagacccggctcgcccgtacgctgcacgaccaccgcaccggcgatcttaccggccagggcgttcgtgaggttgcgctgcgggattttcagggcgtcgcgtgaaacggacgaaatggcgccgatcacgctggccttacgctggtgacccatacctacgaccactgcggcatccatttcgagcgtatcctcttccatgtagatatcgaggctgagcgacttgggcacgacagccgtctggggcttgtaacccagacaggtgaaggtcaggtgaacgcctacgttgggaacgtcgatcacgtagtaaccgttgccgtcggtaacggtacccgtcttggtttcatcgatgataacggcgacgcccgctaccggctgaccattgggatcgatgacttttcctttggcgatcaatctctcggcacgagccggagctgcactgtacgcattcgactccgatgcttcgtcagcggcgaacgcaaacgaaggaaccgatagcgtaatggccaggagaagtgcgaacaagcgccgctcccccccccctcaagaatcggaagcaaagatttgtcataagttcttcatacatttaataattaggaatttaggtggtattgagctctcgtggggacgaatctcaactatttcgttatgaagaacaaattaatagagattttttcaatttgtacctattgtcggaatataaaatgaattaaaaaatgaagtttttttattgtcgaaccgccgttgtggctgtatccggagatttaattcattgtgtaatatcgtgttatttgttgtatgtgtgtgcggtaatttgtaaagcgcgtttgttaaattaagtgtgtatttgtaaatttgtgtttataataagcgctaaattgtttgtattccgtgtgataatttgtatatttgtcaacagaatccgtctattttgcgtagttatgttcgatcctttcgcctttgaacccccttcggccgagttcgctcgggctgtgaaggtctcgattttaaaaagcatattcattaaaaaggaatttacgattcccgacatcgcgcaggccacgaatttcagcgtcacgaccgtggccaaacatgtcgccgaactgcaggagaaaaatttgctcgaactggtcgaccgcgtcaagaccaacaaacggggacgccgtccggcgctctatcgggtcaagtccgaggcctgcagcttcctgggggtggatatcaagtcgcacggactcgccatcggcctgatggacctttcgggcgaaatggtgcggatggagcagatctcggatttctatttcgagaatacgcacaacaagctggatgaaatctgcaaccacatccagcgtttcatcgtgcgggccgagaccgaattgccgggtaaggtcgtctgcgccaacttcaatatcggcggacgggtcaactcgcggacgggtacgagcgcttcggtcttcaatttcgaggagacgcgcgacatgccgctgaccgatctgctgagcgagcggctgaaaatcccggtgttcatcgagaacgacaccaaggcgatggcctacggcgagtatgcctccaaggagcgttcgggatacgagaacgtgatctacgtcaatgtcgggtggggcctcgggctgtgcctgatcgtcaacggcgagatctactacggcaaggacggctattcgggcgaattcggccacgtacacatgtacaacaacaatatcatgtgccactgcggcaagaaggggtgcatcgagaccgaactttcgggcagcgccatctgccgcaagctcatcgagcgtatccataaccacgaggcgtcggtcctttcgcgcaaggtctggggcggcaacgttattacgatcgccgacatcatcgccgccgccgagcaggaggatccgctgtgcatcgaactcgtctcgcaggtcggcagcgagctgggtcaccagctggccggactcatcaatctgctgaatcccgattgtatcgtcatcggcggaaagatcgccgaggtggcgccttattacttcctgcagcctgtgacgctggccattcacaaatattcgctccggctgatgaaccagcatctttcgatcctgccttcgcggctggggcagcatgccggaatcgtcggggcctgcatgctggcgcgcaaacggttggtttgggaccggctgttgggcacggaatagatgcgcggaagcgttgtcgctacgccagcgccttgtactgcgagggcgacatgccggtcaggcgtttgaagtagcatccgaaaaacgactggttcgggaaattgagttggtaggagatctcctgcacgctcatgttcgtatatttcaacagcgattgggcttcgagcaggacaaaatggtcgatccagtccgatacgggtttgccgctgatgcacttgatgatcgttgtgaggtatttgggcgtgatgcagaggctgtgggcgtagaaattcacgctgcgctcctttttgtagtggtcgctcagcaactccaggaattgccggaaataggcttcattgcggttttgcatccgggcctccggttcggggtgttccgcgagataggtctggaacaggttgccgactttgtggatcgtcgcggcgatcagttcgctgacgatgtcgcgggagaattgcagttcgggctcctgaagctcggtgtcgatcagacggatgtaatcgccgagcgattcgccctccgcgctccgcaactcgatgcaggggtggtcggccagttgcaggaacagttgcaggatgcgtttggtgtccagggtgagccgtcgcatgaattcggaggagaaggccagaatacgggctttgaagcgtttgtccgaccgggcctgcatgacgcagcgcggtccgaatatgaacatcgtattgcgcgtgatccgatattcgcgcatgttgagcgaaacggtcgtttcgccctgggtgcagaccccgatgatgaatgcgtcgatccgtcccaggaaggttgcaatttggtcttattcagttcgtcaatcagcgtcagatattcctcgattctttgtttctgcatcttatttctgcggcagaagatatatataatgccgcagatcgctatgactgaaaccaaagcgataatataaattacattttgtcttacactggagcgatagcgttcaaattccaagcgttcgtttttatatcgcagttcggtttcagccgcagaattattcatatagcttaaatgtatcgaatcacataaagcaagacactccttttgcatcaagtaggccgctcggtaatctgcattcaacgtataggtttcggcaaggagaattttagctgccgcatcgttttcgcgcggccccccaatattggctgaaatcgctgcgttcaaataatattcggcgctatccggtttattaatacgcaaataatattctcccaaaacacagcaatcattcggcgataaattatccgacaactggagaaaacgacctacataatcgtaggtttcgttggttacgcctttgttcgaaagaatcccgattagacaacgcaggcagtacacctgaaaatcctcatacccgaattgttcggatagattcaatgcttcccgataatcccggagcgcgttatcgtcatcgttctccatgtagtaaacagcggcaatggcagttttagcgctgacttggtgtttggtcttatttgcggcctgatagttttcgtaggcttcttgataataaaacaaagccctttgataattattctgcttcaaattcaattctcctaacacgaagttacatactccgattaggtaaggatcatctattatatcccgatactccaacgctttaagatatgattcggttgctttctgataattatttgtgctgtattccatgcgccccagacaataccaagaaaggaacttttgtcggttcgtgcctttgcgcatgaaatagtttactgcaggacggagcatcgaatcggtatctatggtttgtcctgttttatccaacgccagcgaataaagcagcccataatgtgctttagtcgattttttgcgaatactgccggggacgatagcttgcaaggagtgtaacgcactgtctgggtaatcgttaattatttcctgcgtgcgttctagttcttcggctatgtatttgctctcggaacatgaacacaagcatagaaaaaaggcgcaaacataaataaatcgtttcataaacagcccaaataattattatccaatatacgaaaaaataccgatttaacttatatctgacaaaattaacatggcataatattgaaggttccggaaaagatataaattcgcgagacctatgctttacgttaggccctttcttcttgcttttgaacttaaatcataaagaggtgaatccatccgttttgttttcgacgcactgtttgatttgccaattccaaaaacttttcgtatcttgcaaatagttatttgaaatgcggtatttgagcgcaatcaactgaaaataaaccgttgccttctcgttacctattatcctatacaaaaatgtaacgactcattaattaagtcgttacatcattataaacccacacccacttcgggtccggtctttttgggctcgaatcgtcaggtgtgtgcgcacacacttgctattttcgaaaattttgcatagctttgccgatgtaacgccgaagaacagcgcaaaccatgtccgacaacgaacatatcacggtccgcatcgtcgacatcgcccgcatggcgggggtgtcggtggcgacggtcgaccgcgtgatccacaaccgcggcaaggtctcggaggagaacctcgcgcgcatcaatgaggtgctgcggcgggtcgactaccgtcccaacctgatcgcccgctcgctggcgtcgggccgcaggtacacgctctgcgcggtcatgccccgtttcgccccgggagagtactgggccgatttcgaggccggaatcgcccgcgccgaggccgaggccgtgcgttacaacgtcacggtccgccgtttctgcttcgaccagtacgaccgttcgtcgttcgaaagcctgctggagacgctgcgccgcgaggagttcgacggcgcggtgatcgccacgctcttcgcggagatggtcgagccgttcacccgcgaactcgacgcccggggggtgccctatgtcttcgtcgattcggacattcccgcctgcaaccggctggcctatttcggcacgtcgtcgttcgacgccggggcggtcgccgcacggctgctgttcgaccgcctcgatccgggagcggacatcgtcgtgggccggatcgttcaccggggcgacgccggttcgaaccagtggcgcaaccgcgaggcgggattccgcagttacctcgaagcgcatgccttccggggccggctgcactacgccgcgctgcggctggacgacgaagcctgcaacggccgcgtgctggatgagatgttccgcgaaaatccgtcgattgccggggccgtgaccttcaattcgacgtgttacatccttgcgggctatctggcggcgcggcggcgcgatggcgtgcggctggtgggctacgacgtgatccgccgcaacggggagatgctctccgcgggcgtggtgacggcgctcgtcgcccagcgtcccgaggcgcagggctaccgcgcggtgatggccctgtgcgaatggctcgtcgagggccgcgctccgtcgaaggtcaacaacatgcccatcgacatcctgctgaaagagaatataccgtattataaaaacaacatcatctgaaaaacatgaaaaatctctttgacatccggggccgtgtcgtcgttgtgacgggtggggccgggattctgggccgctcgatctgcgcttacctcgccgggcagggcgcacgcgtcgctgtgctcgaccgcgatgaaaaggcgggcgaagcgcttgtcggcgaaatccgcgctgcgggcggcgatgcgctcttcttcgcgaccgacgtgctgaaccgcgaggtgctcgtgtcgaaccgcgaggcgattctcggggcctgggggcagatcgacatcctgctgaacgccgcgggcggcaacatgggcggtgcgacgatcgctcccgacaagtcgttcctcgacctggagatcgaagctttccgcaaggtcgtggacctcaatctgttcggcacggtgctgcccacgacggtcttcggcgaggccatgacggcccgcaggaagggcgtgatcgtcaacttctgctccgaatcggcgttgcgtccgctgacccgcgtggtgggctacggagccgccaaggccgccatcgccaactacacgaagtacatggccgccgaactggccatgaagttcagccccgagatgcgcgtcaacgccatcgtcccgggctttctgctgacgaaccagaaccgcgcgctgctgaccaacgaggacggttcgtacaccgaccgtgcgcggacgatcatcgcccacacgcccgccggacgcttcgccgagccggaggagctgctgggtacgatccactacctcgtcagcgacgcttcgtcgttcgtgacgggcgcgctggccgtcgtcgacggcgggttcgacgctttctcgatttgatccgccgcgggagccgtctcttcggcggggtctgacgggcacggcatcgggccgggattgttcgcggccagcggcaacgtgcaggaggtgcaaccgccgcattctcgcttgcagcggagaaaggacaaccgcggtcttcgcccgcggggtactttgtactttttggccgcaaaaagtaccaaaaactccccggcagatgccttcgcctacttcgtcccgtctaacgttcgaaacgggcgcctattcgcgggtttgcaagcaaaccggccccgtttcttgccacttttagccgggacttcgtttcacggctccggcatcgggccgggatcgttcgcggcaattccgtcttttcggccgggtaaagaagcgaacacgcgaacatgcgaacatgcgaacaggggcgaacatctcttgttcgcgtgttcgcggagaatcccggcatcaccccgggaagcggttttaaaccgccgcattctcgcttgcagcggagaaagaacaaccgacagcccgcgtgcccggagcgggaggctgcatagtcttgttcttgctgcgcccgctcaacgcgggccggaggttgttcccgcgaaagcgacatgcggatggttttggtacttttaacttcgctacgctcgttttcctccttctggcacggcatagcccgcaagcggtctctgctcgtgctgcgtgcgtcggttgccatcaaaagtacagagaaagccgcgacgatgtcgcgggtgttttgtaccttttttccgcaaaaagtaccgatcgcagtctgcgactggtgttgtttgccgctttttggtcggctgttaaccgcggtcttcgcccgcggggtactttgtactttttggccgcaaaaagtaccaaaaactccccggcagatgcctgcgcctacttcgtcccgtctaacgctggctccgggcgactattcgcgggggcgcacgtgccccgtccccttcgctcgcgcttttagccgggccttcgtttcacggctccggcatcgggccgggatcgttcgcggcaattccgtcttttcggccgggaaaagaagcgaacacgcgaacatgcgaacaggggcgaacatctcttgttcgcttgttcgcggagaatcccggcatcgcccctggaagcggttttaaaccgccgcattctcgcttgcagcggagaaagcaccgtatgtgaaaaatttgaaaacctaaaaacaatacatccatgtatctttgcaaacaatcctggcgctggtacggtccgaacgaccccgtaagccttcaggacatccgtcaggccggggccaccgacatcgtgaccgccctccatcacattcccaacggcgaggtgtggaccgtcggggagatcgaaaaacgccgaaagacggtcgccgacgcgggccttcgctggtcggtcgtggagagcgtccccgtccacgagcatatcaagacccgcacgggcgatttcgagcgctatatcgagaattacaaacagtcggtccgcaatctggccgaatgcggcgttaaagtaattacctacaactttatgcccgtgctggactggacgcgcacgaacctcgcctacgagttgcccgacgggtcgcgcgccctgcgcttcgagcgtgcggcgttcgtggccttcgatctcttcatcctgaagcgtcccggcgcggagaaggactattccgaggccgagcgcgccgctgccgaggcccgcttcgggcggatggacgccgcggaaaaagagctgatcacccgcaacatgatcgcgggcctgcccggctcggaggagagtttcacgctggagcagttccagcgggagctggaccgttacaaggatgtcacggccgagacgctgcgcgcgaacctcgtggcgttcctgcgcgaggtggctcccgtggccgacgaggcgggtgcggtgctggcgatccatcccgacgatcctccgttcccgatcctcggtctgccccgcattctctccaccgaatccgactttcagaaattggtcgaggcggtccccaacccttcgaacgggctgtgcctctgcacgggttcgttcggagtgtcggccgcgaacgacctgccgggaatgatgctgcggcagggcgaccgggtgaatttcgtccacctgcgctcgacgcagcgcgatgccgagggcaacttctacgaggccaaccatttggagggcgacgtgccgatgtacgacgtgatgaaagccctgctggagattcagcagcgccgacgcatctcgatcccgatgcgtccggaccacggccaccagatgatcgacgacctgaagaagaagaccaatccgggatattcgtgtctgggccgcctgcgcgggctggccgaactgcggggactggagctgggcatcgcccggtcgctgtttgccgataaatagggcagtcttgcacatgacgaatcggtgcgcctcgtgaggggcgcaccgattgtgtcagaacgggttccggagctattttttggccggggccgccggggtctgctgtccggcagcggttttcggggccgccggggtctgcgccgtggccgccgtggtcgccggaacggtctcgatcacgtccacctcggtcaccacccagctgaaaaggtcgttcgcacactggctctccagccggcggatctgcgacatgtcgctcgtgtcggccagaatggcgttgaagaactggtccatcgtggcgtacgtcgcattgaccttcgccgcgaagcagttgtaaaaggctttctgctgctcgtggtcaagccctgcgggcagcacgccctgcgctacgaggtagttgtaggggtagatgtgccgcatgttgcgggcgtcggcgttcagttcgtcgacgatcgtcgagacgaccaccatgtccaccgtgtcgtcgacgccctgcatctggacgaactccatgtagacgggataactgttttcgagctgcccggccacttcgtcggagaagagcacgaactcggcgtcgttcaggtcgtcgaggtacaccatctggcggtagctgcgcagcgcttcgcgcatcgccttgcgctgttcgtggttccattgccgctgctgcgagcagccgaaaaatcctgccgcgaagattgccagcagaggtacacagaggagaatttttttcattttttaccctgattttggttttacttcatttcggaacgcaatagatgtgccaaaaaaatcatatctttgaggaaaagaacccgttatggatgttttgagtttccgcgactactgcctgtcgctgcccctcacggaggaatcgacgccgttcgacgagacgacgctggtctacaagatcggcgggaagatgtacgcctgcgcggatatgaacgatttcgggcaggtggccgtgaagtgcgaccccgacgaggcggtccggctgcgcgagcggtacgaggagatcggcccggcctaccatttcaacaagacgcactggaacggcatccgcactgcgggcgacctgcccgacgccttcatccgcgagcagatacgcaactcctacctgctggtcgtgcggcgcagcgtcacgccccggagcctgcgcgaggagattctgcgtcatgtcgaagagcacgggctgccggaatgaaccttcaacctccgaaaacgatacgatgacgatgagaatgcgatttctttttgcggcgctgacccttgcgctggcagcgggttcgtgcagccgcgaaccgcggaccgaacttttcaacggccgggacctcaccggatgggtgtgcgtcaccgacccggagggcgtcggcgacgcccgggatgccttctccgtgcagaacgggaatatccgcatagcgggcagtccgttcgggtacatgcgcacggaggagacctacgacgattaccggcttcacgtcgagtggcgttggatcggcgaggcgacgaacagcggcattttccagcgcgtgcaggccggcgaccggctttggcccgaggctgtcgagtgtcagttgcaggcggggcgcgcgggcgacctgctggggctgggcggcgcgaagatcgccggggcggagagcaacggaagggtcttcatcaagccgcgcagcggcggggagtgcgagcggcccgcaggcgaatggaactgtgccgagatcgtctgcgtgggcgatcatatcgcggtctgtgtcaacggcgttttgcagaacgagtgcaccggatcggtccgcagcgggtatatcgcgcttcagagcgagggcggtcccgtggagttccgcaacatctggctgacccgcttgagacgcgggatttaggttgcggctggcggcttcggcttgctctcgtcacgaacacgcgaacatgcgaacaaggggtgttcgcccttgttcgcatgttcgtatgttcgcgtgttcgtgcagaatcccggcatcgcccctggaagcggttttaaaccgccgcattatcgcttgcagcggaacgaggacaaccgcggtcttcgcccgcaagacttctttgtaccttttttccgcaaaaagtactgatcgcagtcttcgactggcgagtcgttcgccgcgaaacgcggcgagaaaagtccgcattctcgcttgcagcggaacaagaacaaccgacagcccgcgtgcccggagcgggaggctgcatagtcttgttcttgctgcgcccgctcaacgcgggccggaggttgttcccgcgaaagcgacatgcggatggttttggtacttttaacttcgctacgctcgttttcctccttctggcatggcatagcccgcaagcggtctctgctcgtgctgcgtgcgtcggttgccatcaaaagtacagagaaagccgcgacgatgtcgcgggagttttgtaccttttttccgcaaaaaggtacccaaaaactccccggcagatgccttcgcctacttcgtcccgtctaacgttggctccgggcgcccgcctaaaaggcgggtttaaggggcgatgggccgcagaaaggatcatatccgatacgacgctctcactcttaaaaccggcgtcttacgccggcgctcgcgcttttagccgggccttcgtttcacggctccggcatcgggccggaatcgttcgccgcggaacgcggcgggaggaggtgcaaaatggcccctttcgcaacctgaaaccccggttcttaaccgggcgcagaaccgggcggagagcgggccgaagctgccagtcgcaatgcaaatcccggttcttaaccgggcgaacgcgcgaacaaggggtgttcgcccatgttcgcgtgttcgcgtgttcgcaggtaaaacggatttttaagcccgggcctgccgccgccatcggaggtaacccgccacggccagcgccgagtagagggcgtaaagccccgcggtgtagggcaggtccttatagaggtaaagcccgacggtcaccagatccacgaccagccacacgagccattgctccaccagcttgcgcgacagcatccacatcgccacgaccgacagcgccgtggtccccgcgtcccagaagggtacggtgctgtccgtgaagcgggtcagcagcaggtacagcccgatgtgcgccgcggcgtagacccctgcgagcgccgggaccgtccgcaggggcgtgtggccgatgcgcagcgcggcggcccgctttgcgccctccgcatcttcagggccggtcagcccggcgtccgtttttcggcccctcctgcgccacacgagccacccgtacagccccgccagcacgtagtaagcctgcatcgagcagtcggcatacagccccgatttgtagtagagcgccccgtggatcagaggcatgacaagccccacgatccacagccggatgtcggcgcggtattcgagccagaggtagagcaatcccaacaggacgccggcgatttgcaggaggagttttatgtccattgtttcaacattcgtattgtcattccgaagaggaccgaaggtccgacgtgggaatctgctggaagcgttgtaaggtcacgactttcgcccggattgccacggcatctgcgacgcctcgcaatgcacgaagtacaattatttagttttcagagctgaaattcggtttcagcggcgttgaaatcgcgcgttttaaaatttcaccgtgacgttcgccagcacgttcagcggcgcctgcgggaagtagtaggcctcgtcgatgcgtacgggcgcggggccgctccacgtgtccatgtacgaatacccgtagccgttgctctcgtattccgcattgaacaggttgttgatcagcaggcccagccgaacgctgcgcgccgaacgggtgcggaacgtataggcgaggttgaggttggtcacgcagtaggcgtccagcgacagggcgtcgttctcgttgttggtgaaatactgcttgccgacgtgctgggtgtggaacacggcttcgaatccgcggtggtggaaattcaggaaggcgttggcgatgacgtcgggcgaataggcgatggtcatgtcgcccagctccttgccgtaggtggggctatccttcagtgcgtcgacgtagctctcgatgcggttctgcgagaaggtggcgttggcccccacggtgaaccacccggttgcgcgccacgaggccgacagctccacgccccggcggtagctgtccgggacgttggtgttgagggcgtcgctgccgtcgttcaccatgcccgtcggcacgagctggtccttgtacttcatgtagtagagattcacccccagcgagaggcgcggcgccgtgtactggtagcccagctcccagtcgtagagcttttccgacgaggggtaggtgttcgcctcggcgaacatatagcggtcggtgaagtcgctgcgcgtgggttccttctgggccacggcgaacgagaggtagaagttgttgcgctcggcgagcgtgtagctcacgccggcgcggggattgaagaagtggtactgtttgtccacgtcgatgggctgcatcccgacctcctccgaaacgtagttgtcgttgacgccccaggcctgatagctgacatagcggtactggaggtccgcaaagagcctcaaccctttggccacggaccagttggcgcgagcgaagaggttggcgtcgtgcttgtccacgtcgttgtcgtaccagcggccgccgatctggctgccttccagtccgtccacccagtcgagcacgccccagtgggggcaggagtagtagctgtacgaaccgccgaaggcgaggtcgagcttccgcaccgagtaggccgccgaggcgttcagacctccgaggtggttgcgcatgatcttctcgcggacgaggtcggcctcctttccggcagcgacgtcggccgggatattgaggtattcggagagcgtgcgtgcgtccttgtactgcttgtagaagccgtagccataggtgtagaatcccgtggcgttgagggtccacttctcgttgaaacggtgggagagcaccagctggttgttgatttgcaggtagttgtccgtctgatcgtcgtaatagtctaccgtggcgcgctgccgctcgccgtccttcatataataataggagtgcggtccgttcgaggtgtagtacatgccctcggtgtggaacctccggccgttgagacgcatctcctctttcgtcgcgcccgtgtaggtgagtcccgttttggccttgccgccgaacgaaatcagcttgagcatcgtgttgccgttgtagtagccggcctggaacatgtaggatttgaggtccgtggctccgcggtcgatgtagccttccgagccgatgtgcgtcagccgcgcgtcgagggtccagtggccgcccatcaggcccgaggagatgtgcacggcctgcttgttggtgttgtacgagccgtaggagagcgacgcgtcgccgccgaattcggtttgcagggcgtcggtcgacatgttgaccgctccgccgaaggctcccgtgccgttggtcgagatgccggcgccgcgctgcacctgaatgcttcccacggccgagacgaggtcgggggtgtcgtaccagtacatcgagtgcgagtcggggttgttcatcgccacgccgttgatcgtgacgttgagacgcgttgggtccgtgccgcgcaggcgcacggccgtgccgccgatgccgatgcccgtttcgttggtggcgatcatcgagggggtcagggccagcagcgtggggatgtcggttccgtagctgttgcgggcgatctcttcgcgccggatgtcggagtaggccacgggggtgttcggggttgcgcgcgtggcggtcacctcgacctcctgcaagcggtacattctgaccgaatcgccggcgttttggttggcgggctgcttctcttcagcccgcagctgtgcggccgagcagagcgcggcggccgcaagtgaaagaaaaatccttttcatcgttaaactttttgagttaatggactgaaaaggggtatgtgttgttgattacgcttcgtcccggtctcggcattacccgtctccggttcaatgggtataatctcagcctgacagtaaggcacccctttggaatatcgggtgcaaaggtaagtaataaaaattaaaaattaaaaattaagaattaaaaattgtcggaaaggatacccgtaaatttcgatgtatctggtgccgaaaataagttcggtcctccaatttgtcgaaacgcacagtgcgattttccgcaggtaatttttaattcttaatttttcatttttaattccttagaacgttccgaagcggaaaacgatcttctggcagtaggtttcgccggggcggagcagcggcgaggggaattcgggatggttcacggcgtcggggtagttctggcactccatcgccacgccgtcgtagtcggcatagcggccgcccgacttggtttcggggcatccgcccgcgagccagttgcccgtgtagatcatcacgctgggctgcgacgagagcaccgtcaccgaacggcccgaccggggttcgcgcagggtgccgacctcgcccagaatattgggcttccagccgtcgacgacgaagggatggtcatagcccttgaagtcgcggatgtggttgaactccgacgagatgccggggcggaaagagcggaattcccgaaaatcctgcggggttccggctgcgtccaggagcttgcccgtggggatctggcgttcgttcatttccagaatcttcgagctgttcaggcgcagttcgtggtcgagcaccgacccgctgccttcgcccgcgaggttgaaatagacatggttggtgaggttcaccacggtcgtcttgtcggtccgtgcgaggtaggtgatctccagcgcgttgtcgtcgtcgaaatcgaatacggcctcgacgcacagctcgccgggatagccctggtcgccgtcctccgagacgagcgacatcaccacgcggttggtctccacgcggctctcccagatgcggttggcgaagttcttcgttccgccgtgcaggtggttcacgccgttgttgacctccagccggtactccttgccctcgacggtcatctgcccgaaggcgatgcggttggcgcagcgtcccacgctctttcccgaggcggctccgtcgaagaagtagccttcggggtgtttgtatcccagcaccacgtcggccatgcggccctcgcggtcgggcatcttcaccgagacgatcgccgcgccgtagttcgtgagctgcacttcggctcccgagtcgttgcgcagcgtgtagcgaatgattgcctcgccctccggggtcatgccccagacgtgttgttcgatttgtaccatagtttaatataagttcgacggggttaggttgtttttagatcggagcgattttgtctatgaacccccatcgaacttatattacggcgtttttaacgccggggctcatgttgaaaatccctctgaatcgcccttttcaaagggcgactttactctattgcgggttttagattggtcagcagattgtcgatacgcttcagacactcctctttaccgatgaacgacgttacgtcgtacatgcccgggccttttccggcgcccacgagggccagccgcagggtgttcatcacctggcccatgccgtagcccttctcctcgatccaggcgtggacgatgcgttcggtgttctccagcgagaagtcgtcgattcccgccagcacgtcgcgcaactcccgcagaatggcgggattctgccccttccagtacttgcgcacctgcttttcctcatactcccggggagcctcgaagaagaacgacgtgaggtcccacagatcggtcgtgaacgtcgcgcgctccttcataatgcccgcggctttgccggccacggcgtccgaaacctcgatgccgtggctgcgcaggacgggctggtagagggccgccagttcggcgtcggtcttgtggtgcatgtactgggcgttgaaccaccgggccttgtcgggctggaatcgggcgcccgatttcgagacgcggtcgagcgagaagctgtcgatcagctcctgcatcgagaagatctcctgctccgtgccggggttccagcccagcagcgccagcatgttgatgaacgcctcggggaaatagccgtcctcgcggtagccgtgggcggtctcacccgtcggagaggtccagaagagcggaaataccgggaatcccatcttgtcgccgtcgcgcttcgagagcttgccgccgcccgtgggtttgagcagcaggggcaggtgggcgaaccggggctgcacgtccgtccacccgaaggctttgtacaggaggtagtgcagcggcagcgacggcagccactcttcgccgcggatgacgtgcgacacctccatcagccggtcgtcgacgatattcgccaggtggtaggtgggcagcgcgtcggccgatttgtagagcaccttgtcgtccagcgtcgaggtgttgacctccacgtgtccgcggatcaggtcgtccatcgcgaccgtttcgttttcgggcatccggaagcggatcacccactggtcgccgcggtcgaggcgcgccttcacctcctcggcgggcagcgccagcgacgtggccagcttttcgcgcaccgcataattataggcgaacgcctcgccgcgcgcctcggcctccctgcgcagggcgtccaattcctcggccgtgtcgaaggcgtagtaggcccagcccgcctcgacgagttgcagggcgtatttgaggtagatttcgcgccgctcgctctggcggtagggggcgtgaggccctccgacgcccacgccttcgtcgatctcgatgccgcaccatttgagtgattccagaatgtaatcctccgctccggggacgaaccgctgcgaatcggtgtcctcgatgcgcaggatcatcgttcccttgtgccggcgggcgaacaggtagttgtacagtgccgtacggacgccgccgatgtgcagcggcccggtggggctgggcgcgaagcgcacccgaactggtctttccatagctgtattctttaatttttttacgatcccgggttgcggcgtcagacgttgaacaggaagtgcatgatgtcgccgtcctcgacgacatactccttgccttcgatcgacagtttgcccgcatcgcggcacgccttctccgaacccaaggcggtgtagtcgtcgtacttgatgacctcggcgcggatgaaccccttttcgaaatcggtgtggatgatgccggccgtctgcggggctttcatgccgcgcaggtaggtccaggcgcgggtctcgtcggccccggtggtgaaaaacgtttcgaggttgagcaatttgtaggccgatttgatcaggcgcgccacgcccgactcctccagtcccaggtcttcgaggaacatctgccgctcgtcgaagtcttccagttcggcgatgtcggcctccgtggcggcggcgatgacgagcatttcggcccgctcgccggcgatggcctcccggacggcctcggtgtaggcgttgcccgtcgcggcgctcttttcgtcgacgttgcagacgtacaacacgggcttgtcggtcagcaggttgaggtcggcgaccagtttgcggtcctccttgtcgagttccacggtgcgggccgaaagcccctgttccagcaccgccttgtactgcaagagcaactccacggcgcgcttggcctgcttgtcgccgcccgaggtggcctgcttctgggtcttggagagccggttctcgacggtttcgagatccttcagctgcaattcggtgtcgatgatgcccttgtcgcgcacggggtctatcgagccgtcgacgtgggtgatgttgccgttgtcgaagcaccgcaggacgtggatgatcgcattcgtgttgcggatgttgcccagaaatttgttgcccagaccttcgcccttcgaggcgcccttcacgaggcccgcgatgtcgacgatttcgatcgtcgtcgggaccacgcgcttggggttgtcgatctccgcgaggcggatcagccgccggtcggggaccgtgatcacgcccacattgggctcgatggtgcagaaaggaaagtttgccgcctgtgcctttgcattggacagacagttgaaaagggtcgatttacccacgttcggcaagccgacgatgccgcattgtaacgccatttattcgtttcgtttatgttgctgtcagacaaattgcgcttatcgtgaaacaagcccacaaagatacgaatttcttttcaataatcggagacgctcgcgggtaaaagcggaaagggggatggtttccggctctgggcgcggaaaaaagcgcttctgtccgttccgtttatcccttggcaaataaaacctcttcgccagttggcgaagaggttttatttgccggcagcaaggctggctattcggccagcgaccattcgatcacgaccgggaagtggtccgaggggtatttccggttgtaactgttgttgacgatgcgccacgaaacgaccttcgtgtccttcggcgtgacgaagacgtggtcgatgcgcgacgcagcggcgggaggcgtcgagatgtatttgtagccgttgtaggtgggccagtctccgttggtcttggacggacagcggacgtagctgtcggcaaggatgcctgatccggcgatcgttttgtaggcttcggtgttttggttcgaattgaagtcacccgtgcaaaaggccggtttgccgcctgcgatctcccggaccttggccaccagcagtttggcgctctcggcgcgggccgtggtccctatgtggtcgaagtgcgaattgaaatggtagaattcccgtccgttcgcgcggatgcggaaatgcacccagttgcacatgcggggcgaataggagtcccagcctttggacccgggggcggaaggcgtttcggagtaccagaacgatcccatatccaatacttcgaatttgtccttgcggtagaaaacggggttgtagtggcgtcgttgggccgttttgtcaccgatgacgttttctccgacccaggtgtatccgtcgaggaacggctcgatgtccttgatctgggtcagataaggctcctgcgctccgaagatgtcgaacttctcgctctggagtagttggcgaagcaaatcccggcgggtcgtccatttgttgtcttgatcggaagagttgtcgtactggatgttgtaggtggcgacgcgaatcggatcgagccactcttttccaggtgcaggggcgggtgcgggatcgtcgtttcccgaactgcacagcgagaagagcggcaggcagagcaggaacagactgaaatacggttttcgtatcatttttccgaaagagattggtttcgaatttaagacgaactgtttccggttttgtccccgggggggggcgaaaatttgctatttcgcattttttattcgatttttaccgcttgcagggggacaaaccggacggttttccgttatatcgaatgaccgaccaaaccaatgaaccgaatgtttcggcaacgcaagtacgacacccgacgaatcgaccggcagtatgccgaagagaccgacgtatatgttatgttgtataacagttacgccgatgcgctctatgcctacggcatggggttcggtttcgacaacgaaacggtcaaggatgtcatccacgacatattcctcgacattatgacccgccaggtcgacctgggccgcatcgtcaacatcaaggcctaccttttccggatcgttcacaaccgcctggtcgatctgcaccgttcgcgggtggacaaatgcgacctttcggaccgggagccgggattgcgggtgtcgctgacctcgctcgacgcgatgatcgaatcggagcacgtgctgcgcatccgccaaacgatcgagtcgctgctcaaccagctctcgcccaagcagcgcgaggcgctgctgctgcgcttcgtctacgagatggagtatgacgacatcgccgtcatactcgacgccacgccccacgccgtccgcaagttcgtgtcgaaggggctgggcaaacttcggaagggcagggagtgcggcaaaacgatgaaaatagccacttgacacggcggacgctgttttttgcggttcgagggggacaaaacggcggattcgccgtcataggggagagcgcggcgccgcagccgcagcatgcagtttgaagattacgttggaatcaatgataaaaccggacgatattaagaagcacacggcggagttcttcacctccgacccggacttcgttttgtggtgtctcgatcccgagcgggcgcaggacggctattggtgcggttacaccgaacgccatccgcaggacctggtcgaattcgagcgcgccgtgagcctggtgcgccgtgtgggcaagacccatcccgcgctgccgtccgtggagaaacagttgctgctcgaccgcatcctgaccgaccattacgcccggcgccgttttgcagcccctccccgccgccgcaaccggacggcgctcttcgccgccgcttccctgctggtcgccggcgtcgtggcggccctgttctggagtgcggatttcacgggttccgggctgccttcggccgaggcctatgaaaacatcacgctcgtgacccgcgaaggcagccgcgaggtgtacgacgacatcgcccgtatcagccttacgcccaagggcgaaatcctgatcgacggcaaggagaacgaaggggcggagaccgatcgcaggacgccccggcaggaggtgcgcgtgcatacgagtgagttggtggtccccaagggcaagcgcgcacatctgcaactctccgacgggacgcgggtgtggatcaattcggcgtcggtgctccgtttcccgtcggcgttcggggacacgcgcgacgtcttcgtcgagggcgaagcctatttcgaggtggcgaaggatgcgaaccgtcccttcatcgtgcacaccgaccattttgcgacccgcgtgctgggcacgtcgttcgacgtgacgaccgcgccccgggccgacggttcgtcggccgtggtgctggtcgaaggctccgtggccatcgacgtggccaacggcgaatcggtgacgctgaatccttcggaacgcttctcgatgaaggacggcagctattcggtctacgaggtcgatccctataaatacatcagttggaaggacggactgttgttcttcacctcgaacacgctgttcgaagtcctgcaaaaggtggctgcgttctacaagatcgaaataacctgctccggggagatcgggagccggaagtgtaccggcaagctgatcctgttcgacgacctggacggcacgctcgacgtgctctccgacattttccggatcgcctacgtccgggggcccgacggctcggtggcggtgaggcctgcccccgacgattgcgccgacgccgtatatcgctgacaaccaattccagtcttaaatactaaccttaatactgttacttatgaagaaacttttctttgtgaggagtggctcgacatgccgtatgctgcggattcttgcggcggtgatgctgttgcttccggtgaatctccagcccgtccgggcctcccggcaggacgccggggccaaatcgtcgctgaccgtgaagatgaaggacgcaacgctgtcgagcgtctttgccgaggtcgagcggaccagccgctacgccttcatttacaccgacgacgtgcggccgctgctcgaccgccgggtttcggtttcggtcaggtctgcgaccatcgacgaactgctgtccgcggtcctcaagggaacggagctgaccggacgggtgcgcgaaagccaggtgatcatctcgaaagcgcccgctcggaaaaacgccgccgtcaccccccccctcccggctgcgaattccggtagggaaatcgtcttgcaggggacggtgatctcttcggccgacaacaagcccatcgtcggtgtttcggtctatgtcgaggggacgaccgtcggcgccacctcggacatcaacggcaactacaccctcaaggtgccggcgggaacgaaacacgtcaccttcgcttttctgggctacgacaccaagaagatcgccgtcgccgatgtcgaactgttcaagctcgtgacgctgatcgaggcgtcgaacgtcatggacgacgtggtggtcgtggccttcggcacgcagaagaaggagagtttggtgggagccgtgcaggtcgtgcgtcccagtacgctcaaggtgacgtcgagcaacctctcgacctcgttcgcgggcaagatcgccggcgtcatctcgacccagtcgtcgggcgaacccggcgccgacggtgcgaatttctggattcgcggcatctcgaccttcggggctaacaaatcgccgctgctgattctcgacggcgtggagatcgtctcggagatgctcaacaacattccgcccgaggcgatcgagtcgttttcgatcctgcgcgacgccacggccacggcgctctacggttcgcgcggcgccaacggcgtaatgatcattaccaccaaaaacggccgccagtcggagaagatggcgatcaacgttcgtctcgagtcgggcatttcgatgccgacgcgcgtgcaggacatcgccgacggcgtgacttacatggagaactacaacgaggcgctgcgcacccgcaccccggcgggcgaaacttatgtgcagcacttttcggacgagaagatcacgggcacgcgcaaccggctcaatccctacgtctatcccgacaatgactggtattcgatgcttttcaaggattttacggtcaacgagaacatgaatctcaatgtgcggggcggcggcaaggtggtcgactatttcctcaatgcttcgatcttcaacgaaaacggtatcctgaagaagcccgcggagtcgaaattcaacaccaacatcaattcgcagaaataccttttccaggccaacgtcggcgcgcagctcacccgaacgacccgcgtgagtctgaagatgaacacgcaactgcttttctggcaccgtcccgtcgaagaggtgaaagacctgttctactatacgatgcgcgccaatccggtcgcttttccggccatctatcccaaaggctccgtggaggatctcgacgacccgattttcggaaatgccccttcgtgggacggtggttctacggacatcaatccttatgccctgttgagccgcggatacggacagcgccatacgcagtacatcaccacgaccttctcggtggaccaggacctcgatttcgtcaccaagggactgaaagtccggggcatggtctcgttctacaacaagacctatgcggcgacttaccgttctttttctccctattattacgaaatgaccgactataccgacaacggcgacgggactttcgactacaacctgcaaagcatcggcacgcccggatcgtcctatctgggaacctccacggggcggaacggttaccgtgagatctcgttgcaggggcagatcgaatattcgcgcacgttcggcaaacacgacgtcaacgccctgttcgtctaccaccagaaggagaaggtcgacaatcagcccgccaatgatgagtacaaggtgctcccttaccgcgagcagggtctcgccggacgttttacctatgggtacgacagtcgctacctgatggagttcaacttcggctacaacggctcggagaacttcatatcgggtcgtcgtttcgggttttttccctcgatcgccggagcgtgggtcgtgtcgggcgaaccgttctgggacggtatccgcagcaaggtgaacctgctgaaaatccgtgcttcgtacggcctttcgggcaacgactatctggccgacagcagcaacaacatcgtccgtttcccctatctcacgacggtcaacatgaacaaggcgctctacgtgtggttttcgcccaacttcgtcaagcagaccggacacgagatcaagaccgtgggcaatcccctggccacgtgggaggagagcaccaaacttaacgtaggacttgaactgggactgttcgacgccctgacgctgaacgtcgacgtttacaaggaaaatcgtaccggcatcttcatgcagcggcgttcgctgccctcgacgatgggcctttcgggcgtcacgccctacggcaatctgggtgaggtggagaaccgcggcgtcgatgtttcgctcgaatacaacaaggcgttcaacaaggacctgctggtctccgtgcgcggaacgttcacctatgcgcacaacgaggtgaaggcccgcgacgaggcgaaatacctgcccaacaaatacaactccgtgctgggcaaacccgtcaattcggtttacggactggtcgccgacggccttttcgcctcgcaggaggagatcgacaactcgccccggcagaccttcatgcccgattatctgccgggcgacatcaaataccgcgacatgaacggcgacggcgtgatcgacgccaacgaccgcacgtcgctgggttatcccaccgtgcccgagatcttgtacggcttcggcgcctcggtcaactacaaacgctgggacttctcgttcttcttccagggcacggcgcgcgtctcgctgcgcatgtacgacatgcacccgttccgcgacaatcagtattcgggcttcaacatgacgcagtacgttgccgacgaccactggtcggaagccgatcccaatcccaatgccgcctatccgcgcctggattaccgctacaacgccaacaacacgcagacctcgtcgttctggatcaagaacggcagctacctgcgcctgaagagcgtcgaactgggtttcacgtacaaaagcctgcgcgcctatctggccggcacgaatctgttcatcatttcgcccttcaaatactgggaccccgaaatgggaagcggcaacggcttgaaatacccgttgcagcgcgtggtgaaactcggccttcagtataacttctaaaattcgagcgacatgaaaaaaatcatatccattttgctgtttgcgtgcgccggagcgcttgccgcgtgcgatttcctcgacgtggttcccgaggggcaggcgacgcaggaggacatcttcaaaacctccaaggaggcccgcaagtacctcaatacgctctacacctacgcccccaacatcgcggcctaccgctacatgcccgacttctgcgccggcgacgacattatcaccgccaccaacggccagacccgttattttccctacaagagcatgctctacaacgaggagaacgccagccagacctactacggtctgtgggacgcgacgacctcttccccgtccgggcgcacgaactacgacatgtacaagggcatccgctactgttacattatgatcgacaatatcgacgcagtcccgggcatctcgccgtccgtggccgacgagttcaagggcgaagcctattttctgatcgcctattaccactgggtgctgctgactcactacggcccggtcatcctcgtcagggggcagctggacatggggcttcccgaggagcaggtctatgtggcccgcagtccgttcgacgaatgcgtgacgttcatcgccgagacctacgaccgcgcggccgatttgctgcacgggtatccgacgcgtcccgatgccgacctggggcgcgccacctcggtggcggccaaggcgatgaaggcccggctgctgctctatgccgccagtccgctctgcaacggcaacacggagttctacgcgcgtttccgcaacaacgacggcacgccgctgatgagccagacctacaatcccgaaaagtggaagtgggcgctcgacgcctgccaggaagcgatcacgctggccgaggacaacgggcacaggctctacgaaagcccgaacgcgactgcggctgcaaccgctgccgagcgcggcgagatcaactaccacgactgcttcgtcgaaccgctctggaacacggccgagtacctttgggcgatgggcgaccagaccggcatcgagcacttgcagcgttacggaggcgcgcgcctgaagctgccgtacagtaccgacggcttctgcatcaacatcgttccgacgttcgagtgcgtggagatgtactacacgcacaacggtctgccgtgggaccgagaccccgagaccatgcatatcgacccctatgcctataatgccgaaaaggagactgccaacctccatgtctacaaggagccgcgcttctatgcgtcggtgggctacgaccgcggcaagtacgccatcaacggcgaggagttcattctcaaatgccgcgccggcgagatgcagggcagcgtgctcgacgcctcgaaggagtaccagagctgtacgggctacattctcaagaagtggattcaccgccagtcggccttcaactacgacaccaagtcgtggacctaccgcaagtacgcctatccttacatccgccttgcggaactctatttgagctatgccgaggccgatttcgaatacaacgggtcgttgagcgacgcgagcctcaattacctgaatctggtccgccgccgctcggggctgcccgatttcaaggattcgtgggccttggccgggggcattcccaccggcgacgaactgcgcaaggtgctgcaccgggagcgttcgatcgaactgctgatggagggcatgcgctaccacgacctgcgccgttggaaagaggcgggcgaagcgatgtcccggcgtcccaaggcgtggaacctcgacggcaggacggcggccgatttctaccgggtctccacgatgaaggagagcggcgtccgcacgttcgaatcccccaagacctactggatggccattccgttgagcgaaatcaatatcaactacaacctcgtgcagaatcccggttactaaccttaataatccgattgcgatgaagaatcttgcgatatgcctcctgcttctgctgggagccgtagggtgcggcgacgattacgtcgtctacgagacggtggacactatggtctgcatcccgaagaacgatttccaggtcctcgaatacgatgccgcttcgggccaagcgtgcgtttacgatctctatctttacaagggcggttacaatgacgacggaatcaccgtgaaactggtggtcgacccctccgtgctcgatgtctataacgtggaaagcggactcgaactgaaggtgatgcccgacaggtatttcgccttcgaccccgaagtgcgcttgtcgggggacagggtcatggaccgcgccgaaatccgcttcgatgccgcttcgatgcttgccgacggcattgattcctcctatgtgctgccgctttccgtcagggccgatgatcagggcaaggtgcgtcccgaaaagaacagcgtaatcatccgggtcgtgatgaaataaccgtgatgcggaggaggtccggcctcctccgcatcctcaatgcaaaaaaatatgtcaaaattctacatgcggcttctgtcggtgtgcctcgccgcccttgtcctggcggcctgctcctcctcggagggcggcggtgacgacggcccgaccgccggacagatccccgataaggccggaatgacggtgaagggaatcgtgaaggacagcgccggcaatggcattgccggggtggtggtgagcgacggcctggaggtgacggcgaccgacgaacgggggatttactatctggcctccgacctcgcgcggcgcaatttcgtctttgtctccgtgcctgccgactgcgagattcccgccacgcagggctgtccgcggttctaccgcaaaatcgaccgcaaacaggccgtcaaccgggccgattttacgctgacacgacgcaagactccgtccgaccgccattcgctgatcgttatggccgacattcagctggctgccgataacacgtcggtggattcctatctcggtcatgtcgttcccgatgtgctgaaaaccgtgcaggggcttccgacggaggtttacggagtcagcctgggcgacctggtctggaacgatatgtcgcttttcccgaagtaccgtcaggggctggagacgcttggcttcacgaccttcagcctgccgggcaaccacgatcacgatccggccgagttgaccgattcgctcgccttgcagagctacgaacgctatttcggtccggcgaactactcggtgaacatcgggaaaatccattatctgttcctcgacaacatccttttcgaccatgcgccgaccgccgaagaggagtatacgatcggtcttacggacgaaatttgccgttggatcgaagccgatttgcgctacgttccggcgggcagcacgctcgtcgtctcgtcccattgcccgattctctatcacacgaagaacaccgcagcgcgcaaccaccgcaatttccagcgtttcctcgatgcgataagcccctataaggtccatgccttcggggggcacaagcactaccatgacatttaccgttacgacgacggacgcaaggtcatgcactgcatcgcccgcacgccgggcgacctgttcatcaacggcgacgtcaactgcgacggcacgccgcgcggctatgccgtggtcgaggtcgatggcgaacggctctcgtggtattacaagccggcgggcgggaagcgcgatatgcagatgcgcctctatgcacccggacgcaccaattcggcctgtgtctatgccaatgtctggggttatgacacggcctggagcgccgtggagtggattcccgcttcgggcgggcaggcggtggcgatggagcggacgcagcgcaccgatccctattacgaggaggtgctggcgacgggtgtgcgcggagggacgccgaccaatacgtggcatatgttccgggtcgatccgggcagcgagcggggcggcatggtgcgggtcaccgacagtttcgggcatacctacgaatcgtccgtgtcctggtaaatacgacattcgaacaaaaccttaaatacaacttcaacgatgaagagactttttctttttctgaccgtcgcggcagccgtttgctgtgcggcgtgcagcgacgatcccgaggtcgccgaatccaacctttcactgctcgaggataacgtgacgttcgatatgttcggagggcgcagcgtccttgaaatcacggccgattcgccgtggacggtctcctgcgacgacgattggtgccgcaccaacgtcgccgaaggttcgcacacgaagaagatcgttctgacggtcgaccagagtttcctgcccgaggagcgcacgaccgcggtgcgtttttacgccgcgggcgaagagaagcacaccgtgaccgtgacgcaggagaagttcgagccgatcctcgtgctggcggagaacggcgccgatataaccgtctacggcgccgggagcgaaccggccctgaacctgcgtgcatccgtggcatggaaaatcgagggcgcgaccgactggtgcgccgtgtcgcagtccgaagggacgaaaagttcggtcgtgaaactgttgctgaccgacgacggcgagggcgtgcgtccgcgcagcgcgacgctgaccgtctcctccgagatggagggcgtcgaaccgcagcaggtgaccgtcgtgcagcggtcgaccggagcgaatacggtcgtggtccgggcgggtgaaacccgtgcgtttccggcgcggcgcaccgacggcgcgtatgtgaagggcgttgcggcggactgggtctggaccaccgacgcagagttgctttcggggcttgactacgacgcttcccggaatgaaatcacctgcactgcggccaagtcgaagcagggcagcgggctggtcgcgctgttcgacgccggaggcgcggttgtctggtcgtggctggtctgggtcgtggacaagatgccttcggacgtgaccgtcggcggtatcgcctggcaggaccgcaatgtcggggccgaataccattcggccgacccgaaggcctgtgtgcaggatttccgctcctacggactgttctatcagtggggccgcaaggagccgttcatcggcgcgaagatcctctcgaagaacaaatattacgaggggcatgcggagtatcccgatgctttcggcgcgatgacgcgcgaggtggttttcaacgcctcccgcaccgccggctggcaggtcagcggcgaggagatgacagccgcaacggcaaacggcaatccgacgacgttctatacccggtcgtccgcagcgatgtccgaaggctggaccgagggcggcaaggggctgaacgatccctgcccggtgggataccgggtgccgacggcggccgaatggcagtcgctgcttgcctacgtggacggcaacgccgccaagaaccaggactcgggcgacacgtacagccgctggtatgcgctcaattcgggcggaaccctcatcggcccgtcgacgatgttccgcaagggcgataacggccgcatccactatccggggcgttcggcagcctattgttcgtcgacgctcgccggcggcaagccgctcccgatgtacgactggaaggcgggcgacgccacgggcgaggggacctattacgaacggaagatgaccacagcctacggcatgcgctgcgtgaaggagtgacgccgctgcgatcgcgggggcttcgggcgggagtgagtttattccgttccgaagccctttttttgcggtattttcattaccttcgcatgtcttttcaaacttttaccgatgaaaaatagcatctttaccgtattggcggccctcgtgctgtatcccgccggggcgcagcccgtcaccccgcaggaccggcggcgcgccgcggaactggtcgaacgcatgacgctcgacgaaaagatcggccagctggtccagcagcgcggaggcggcgccgtcacgggacccgacaagacggaactttccgtcgaacggctggtccgcgaagggcgctgcggcagcgtattcaacatcaagtccttcgaggagaccgagcggttgcagcggatcgccgtcgaggagagccggctgggcatcccgctgttgatcggcgccgatgtgatccacggtttccggacgatcttcccgatcaacctcgccgtcgccgcctcgtgggaccctgccgccgcggagtcgctggcccgcgtttcggctcgcgaagcctcggccatgggcatccattggaccttttcgccgatgtgcgacgtttcgcgcgacccccggtggggccgtgtctccgagggcgcgggcgaagacccctatctgggcgcgcgtgtcgccgaagcgatggtgcggggctatcagggcgacttgtccgacccctcgtcggtccttgcctgcgtgaagcatttcgccgcctacggcgctccgcaggccgggcgcgaataccatgcggtcgatatgtccgagcgggttttccgcgacagctacctgccgccttaccgggcggcgctcgatgccggggccgcgacggtgatgacctcgttcaatgacctcgacggcgttccggccacggccaaccgctggctgatgcgcgacctgctgcgcgacgaactgggcttcggcggattcgtggtgaccgactacggcacgatcggcgaactgaaagctcacggcgtggcgggcgacgatgcgcaggctgccgaactggccctgcgcgccggggtcaacatggacatgatgagcgccgcctacctgtttcatgccgccgaactggtgcgggaggggcgtatcccggagtcgctgatcgacagcctttgctgcgaggtgctggccgtgaagttccgcctggggctgttcgacgatcctttccgctaccaggcgaaggagcgcgagaagtgctattacgccctggaacatctcgatgccgcgcgccgcgtggcccgcagttcgatggtgctgctggagaaccgcggcggcgtgctgcccctgaaaaaggggagccggatcgcgctggtgggacctttcgccgattcccggtgggacctgatcggctcgtgggttcatttcgccgaggccggccggacctcgacctttctcgacggactgcgggcgcgtttcggagccgaccgtgtgacctatgcccgcggatgcgacccgcacaaggccctcgaaggcggtatttcggaggcggtggccgcagccgcgaagtcggacgtggtgctggtcgcgctcggattgaaggcgggggagagcggcgaggcggcaagccttgcgtcgcttgcgctgcccgacgcgcagcgtgacctgctggagagcttgaagcaaaccgggaaaccgattgtcgtcctgctggttacgggccgtcctatggagctggcccgtgaagcggaacttgccgacgccctgctgctgacctggtatccgggcacgatggcgggcgaggcgctggccgatgtcgtgtcgggcgattacaacccttcggggcgtttgccgatgacctttccccgcacggtggggcagattccgatccattacgacatgaagagcacgggacgtccggccgacgagtcgggcaagcccaacaaatacacttcgcgctatctcgacgtacccaattcgccgcagtattgtttcggctacgggttgagctacacgacgttcggttattcggacctgcgggtgctgacgcccgaaaccgccgtcggcggcgaggttcgcgtgtcggtccgcgtgaccaacacgggcggccgcgacggcgaggaggtcgtgcagctctacgtgcgcgatctgctgtccggtgtgacgcgtccggttcgtgaactgaaaggtttccggaaggtcatgcttcgcgccggggagagccgcgaggtgaccttcacactgacgcccgacgacctttcgttctggcgtctcgacaaaaagtggggccaggagccgggcgactaccatgtctgggtagggcacgactccgactgcacgctcggcggcagtttccggatcaccgaatgattcgtctctccggcacggcggccgacgccgcgggtgcgggacagctgcaagggagcagcggcttcggccgccgctcccttttccgtgcccggcgggacggtccggatgtcccggaaaaacccgttcggagatgtttcggacaaaaggttccggggaatggctgggctttcgcaaattttttctacctttggaggtcaaaacagtacgcaatgatggatttgaagacgatacgtgccgaactgcgcaagctgaccgcgattgtcgacggctgggagccttccggggagattccggccctcgaacgcgacctggcgctggaaaaactgcggacgctctacgatgcggtgcgctttacggaggtggaatcccttccggaattcccggttgcggagacggagcctgcggcggctccggtgcccatcgacctcggggcggtgctttcgctcgacccgacggacgaagccgtgttcgaacccggtcccgatgccgtttcaggacccgcgttcgatgcggaggcggaacccgcagagccgttttccgaacccgatacgacggtcgcggccgattctgccggggcgtttgccggggggaatcccgatacggagacgcccggaatggcggagcctgcggtgtcggattccgagccggaacttgagggggaatccggatttgagcctgatcccgaagcggcgtccgaagccgcattcgtcgccggagaatccgaaccggccgccgaatccgggccggtcgctgcgcctgaatccgaggctgcggctgaaccgtctgcgaagccggtcgctgcgcccggacctgccgctgcggctgaatcggccgtcgttccggaacccgctcctgcgccagctccggaacccgctcctgcggagaaaccccaatacatcgcgcccacgctgttcgggctggaggaggagaccgtccgccaccgtcacaaacagcgcgtcatcatgtcgctctacgatacgcccgcgcccgccgaaaagcccgcaaggcccgaaacggcggaaagaccggcggagcgtcccgaacccgctgcccgccccgaacccgctgtgacgctcgaacccgctgcccgtcccgaacccgctgcgacgcccggaccgactgtccgtcccgggtttgccgcgactcccgaaccggcggctgcgcctgcgtccgcaggtcccgggccgcagtccggaacgtccgtgccgcagtccgcggcggaacccgtcaccgtttcggaagcgcctgccgccgccgagccggaggaggccgaatccggagcgaaggaggttgcggtccctgtcggggccgtgctgggcgaggtgatcaaccacgacgtgcagacgctggccgatacgatcgctccgcggcgcgacatggcttcggaactgcgccgcggcgaaccggtcgccgaccttcgcaacgccatcggcatcaacgacaagttcctgctgatccgcgatctgttcggcggcgacggcgaagcctatgaagaggcgatcgcgacgctcaacgccttcgacgatttcgacgagtgcatgatccacattgccgagaactacgcctggaatcccaattcggacggcgcgaagtttatgatggaactgctcgaacgcaaattcgcctgacacgatggccaaactctatatcgtacctacgccgatcgggaatctggacgacatcacgctgcgcgcggtgaacgtcctgcgcgaggtggatttcatcctcgccgaggacacgcgcacgacgtcgttcctgctgaagcacctcggcatcgagcagaaactccgttcgcaccacaagttcaacgagcacgccacggtcgaaatggtcgccggggcgatcgccgcgggacgcaatgccgccctggtgtcggacgccgggacgcccggcatttcggaccccgggttcctgttggtgcgcacgtgcgtcgaggcggggatcgaggtcgagacgctgcccggcgccacggcgctgattccggcgctggtgcagagcgggtttccgtgcgaccgtttctgcttcgagggcttcctgccccagaagaaggggcggatgaagcagttgcaggcgcttgccggcgaggagcgcacgatgattttctacgaatcaccctaccgcgtggtccggtgtctcgagcagttcgccgaggttttcggtgaagaccgccgggtttcggtgtcgcgcgagatcaccaagaagttcgagcagaccgtgcgcggaaccgtcgccgaggtgctcgggcatttccgcacgaccgaacccaagggcgagttcgtgatcgtcgtggccggaaaacccaaagtccgccgcgtccgggaggacggggaggagtaactcaaatcgaaacgcaattgatggaagagaaccgtacagacgatacacaaaaggtaaaacgttcgttttcggcgtggctcggggagttgcgcgaatttatgaagggccgtttcagcctcgacgaggacaaggcgcagcgcgacgaggtcgtggcctccgtctcgaagggcgtggagttccgcggcgtcaacctctgggtgctgatcttcgccacgatgatcgcctcgctgggcctgaacgtcaattcggccgcggtgatcatcggcgcgatgctcatttcgccgatcatgggcccgatcatgggtgtcggcctcgcgctgggcatcaacgatttcgaactgctcaagaagtcgctgcgcaacctggcgctgatgttcatcgtcgccatcatcacctcgacggtctatttcttcatctcgccgctctcgtcgaacagcagcgagctgctggcgcgcaccgtgcctacgacctacgacgtgctgatcgccctgttcggcggcctggcgggcatcgtggcgcagacgcggcaggaccgcacgtcgaccgtcattcccggcgtggccatcgccacggccctcatcccgcccctctgtacggcgggcttcggactggccacggggcagttccgctttttcatcggcgccttctacctcttcttcatcaattcggtgttcatcgcgctggcgacctatgccatggtgcgttttctgcaatacgagaagaaggtcttcatcgacaaggtccgcgagcgcacggtcaagcggctgatgatggtcatcacgctggtgaccttcatcccgagcgtcgtcatcgggttccacatggtccgcgtctcgttgttcgaggccgtggccgacaaatacgtgtcgcaggtcttcaactttccgcatacccgcgtgatcgagtgcaacaaacactacgcgcagggcaagaacccctcgcagatcgagctgctgctcgtgggcgagccgctgggcgaggaggtgatcgagaatgcccgtacgcagatgcgcaatttcgggctggaggaggccgaactggtcgtccggcaggccaatacggaggacaaggtcgacgtggtttcgcttcagaagagctatcaggagctgctggaggagaagaaccgccggatcggcgagatgtcttcgcagctgaaacgctaccgggtgaccaacgtcgaggtgaacgacatctcgcgcgaagtgggggccatgatggacaacatcggggccatttcgctgaccaagggcatcaccttcgacgtcgagggcacgcccggcgatacgacgctcgtgtgcgtggtgacgccccgggattccgcgcttccggtcgaccgtgaaacgctgatccgctggttgagaatccgcaccaaggtcgagaacgtcaaacttttcgtggaaccctaatccgggcggcaggcatgaaacgaaccgatctgaccattttgcagcgcttctggctggagaccctttggctgggcgcacgcgtgttcgccgtgatgccttactggttcaagtactacgtcgtcgaaaacctgcttttcgtcctgctctactactgcctgcgctaccgcatgaaggtcgtcaagaccaacctgcggaactcgttccccgagaagagcgaacgcgaactggccgtcatccggcggcggttctaccgcacgctgtccgaaatcttcgtcgacacgatcaacatggcctacatgaacgaggagaaggggcggacggtgcttacggtcaaagacgtggagaaacacgtggaagcggtgcacggccgcgactggatcgccatgacggcccatttcggctgctgggagtactgctcctactgggggctttacgagcggtcgcagatgctggtcgccgtctaccatccgctgcgcagcaaggtgatggaggaactctaccggcggctgcgcaattacgaaaattcgatgaccgtctcgatgaaggagagcctgcgtttctacctgcgcaaccggaccggaggcatcgccggcaagaacctcgtgatggggcttatcgccgaccagaatcccccgcggcggcccgacagccgttggttccgcttcctcaatcaggatacgatcttcttcgacggtggcgagaaactggccctgcgctgcaacctcccggtctacttcgtgaagatgagccgcctgcggcggggacgctacgaaatgtccttcgaactgatttatgacggcaaagaggaggtcgccgaatacgaaatcacgcagcgttacgttcgtaagttggagcggatgatctgcgagtgtcccgaactgtggatgtggtcgcatcgccgctggaagcacaaacgaactcatgccggtcgctaaaattatcatactcaactggaacggtgcggaccacctgcgtcgtttcctgccgtcggtcgtggccgcggctcccgccggcgtcgaggtcatcgtcgccgacaacggttcgacggacgactctcttgcggcgctcgccgccgggtttccgtcggtcacggtcctgcgcatggaccgcaactacggctttgccggaggctacaaccgcgcattggagtatatcgaggccgattattacctgctgctgaactccgatgtcgagacccccgaggggtggcttgcgccgattctcgactgtctggaccggaatcccgacgtggcggtcgccgcgccgaagctgatctcctgcgccgaccgcacggagttcgagtatgcgggggctgcgggcggtttcatcgactacctgggctatcccttctgccgggggcgcatcctgcgctgcgtggagaaggaccggggccagtacgacgacgagcgcgacgtgttctgggtgagcggcgcggctttctgctgccgggccgacgtgttccgtgcgctgggcggcttcgacggcgatttcttcgcccacatggaggagatcgacctctgctggcggatgcagctggcgggttaccgggtgcggatcgtgccccggagcagggtctaccacctgggcggcggcacgctccagaccgattctccggccaaggtcttctacaatcaccggaacaatctcgccatgctttacaagtgcgcctcgcccgcacagcggctttgcgtggccgttgcgcgcccggcgctcgacctgctcgccgcgctgtcctacctcatgcagggccgccgggacaacttccgcgccgtgttccgcgcctggggcgacttcatccgctggcacggggcgctggcccgcaaacggcgtgagatccgcgcgaaccgcaagggctccgccgcggaaaacatctaccgcggctcggtggtgctgcgctatcttttcggccggcggaccttcggcggcatgatgcgctgacgcggagccgatgtcgtcgttttcgcaacgggacttgtgcgatcttcgttttttgcgtatctttctgaaaaataccctcgcttatgatacgtgcggctcttctgttgtcggcagtcgtgtgttttttgcagccttttcgcgcgtcggcgacagggcaggctgccgaacggcttgtcgtcgggcgcgatacgatgcagttgttcgcactgccgctggcgacggcggattccgccgtgctcgcccggctcgaaaaacggctggacgaactcgatgcctccggctctacggcttgcaggcgtcgctgtatcggtgtctggcggctggacgacgagggcatcttgtggcttgagtgcgtgaacaccgaggacggcgacgtcgtattttccggagcggagctggttcccgaatttgcagcgggatcacgcgcccgggccggctggttcagcggagagatccgctatggcacggggaatctggtgtattaccaacacgatggatttatgcggaatctcgaacgcgaatgggtggctgcggtgtccgaggggcgcgtgagtgagacgaaagcctaccggaaccggctgtatgaaagaggtgcggatgcgacggacaatgcacagcgtgtggccgcggcgttcgacagccttcatgtcggaaagtcgcccgatctgctgtcgctgtatgtggtctttgcagccgattccacagggcgggtggttcggatcgaccgggcgcgactgttgtcggaaaagggaagtcctgttgtcagcgatccggctgacccgctgttgcaggcagctctgcgggcgtttcgctcggtgtcgcgctgggatgcctggtgggtcggagagacctggaaggaacaggcgtattttattccgctgcgcagggccgggagggtttggaaaccgcgaagaggataacgatgcttattgctccggcttgcaggggagcgtgaaccagaaggtcgagcctttgcccggtcgggattcgacgccgatgcggccgcccatcgtttcgacgatcgacttcgagatcgccagtccgatgccgatgccctgcctgaacgatcccgccttgacgaaacgttggaaaagctgtccccggtgttcttcggggatgccggctcccgtgtcggcgacgtagacgtagagttccccgccgcggatttcgaacccgaaatcgacggaaccttcggaggtgaatttcacggcgttgctcaaaaggttggcgatcacctgaatcagccgtttgcggtccgtgcggatgtagcggacgggatattttctgtggaaggtgatccgcaccgggctgttctccggctgccgcatgcggaaaccgccttccagctcttccatgacggcattgagttccacgtcgctatattcgtagccgagggttccggcttcgatcttcgagagatcgaggatgtcgctgagttgctgcatcagtacctcgccgttggagcggatgatgcgcatgtactcctgtttctcggtcggggcggggtcgtccatgagcagttccgagaatccgatgatggcgttcagcggcgtgcgcagttcgtggctcatgttggccaggaagcgtgatttcatgcggtcggactcttcggcgcgaacgcgggctttctccagttcgcgctgggtgcgtttctgggccgagatgtcgcttacggtcagcaccacccggggttgtcctgcgacggtgaggaaattgcccgccacgcttacgtcgcagtcgacggtctccgtgtggtcgtcggaggtgtagagcaccatcgggacctccagtcccgagaagcctttcttcgtccggaacaccccggtgatggccgcgcggacgggacagtcggcgcacaattcgtgcgtgccgcagacgccggcgtcctcgccgttcctgcagcgcagcaggttgcccaccttgggcggcacggcttgcggtgcggttcccgtcgcggagcgatagttggtttgcagaacgttgaaatcggggtcgatcagcagcaggtaggcggctacgttgcggaatatgcagtcgttgatccggtcgcttgttcggatgtaccggcgctggtagcagatacggacggccaggaggacgcaaaacgccgccagcacccctgttcctattacgtataacaactgcatccgattattcggttttcgtttccgatcccaaaggtaggtaaaatccggtgaaataggagggtaaatgataaaaaagacatccggaatcgtccggatgtctttttttgtcggtgggggatctttctatttgttgatcttggcccacgagtccttgagcgttaccgtgcggttgaacaccagatgaccgggggtcgagtcggtgtcggggcagaagtagcccacgcgctcgaactgtacggcctggcctacggggatgtcgcgcagcgacggctcgaggtagcctgtgattttgaccattgattcgggattgaggttgtcctcccaggtctgcccttcgtccacgtcgtcggggtcctccttcgtgaagagcgggttgaacagccggatttcggcctccacggcatccgcggccgacacccagtggatgacgcctttcacgcggcggccgtcgctcgacgaacctccgcccgacatcgggtcgtaggtgcagcgcagttcggtgatgttgcccccctcgtccttgacgacctcctcgcacttgatgaggtacgaatagcgcaggcgcacctcgccgcccggcgagaggcggaagaacttcttgggcggattctccatgaagtcgtcgcgctcgatccagatcaccttcgagaagggaacctgccgcgtgccggcggcttcgtcctcggggttgttgatcgccgtgaacagctcggttttgtcgtcctcgtagttcgtgatgaccaccttcagcggattcagcacggccatgcggcgctgggcgacccggttcaggtcttcgcgcacgcagtattccagcttcccgaggtcgatcacgttgtcgcgcttggcgacgcccaccatctcggcgaagttgcgcaccgaggcgggcgtgtagcccttgcggcgcagggcgcagatcgtcggcatgcggggatcgtcccagcccatcacggcgccctcctgcacgagcttcaacagcttgcgcttcgacatcatcgtataggtgaggttcaggcgcgcgaactcgtactggtgcgaggggaaaatgtcgagcgcctggatgaaccagtcgtacagcggacggtgcacgtcgaattccagggtgcagatcgagtgggtgatccgctcgatcgagtcgctctggccgtgggcgtagtcgtacatcgggtagatgcaccatttgtcgcccgtgcggtgatgctcggcgtggatgatgcggtacatgatcgggtcgcggaacagcatgttcggatgggccatgtcgatcttggcgcgcagcaccttggctccgtcggggaactcgccgttcttcattctcgtgaacaaatcgaggttttcctccaccgaacggtcgcgccacggcgagggcgttcccggcacggacaccgtgccgcggttttcgcggatctcgtcctgcgtctggtcgtcgacgtaggccagccccttcttgatcagttcgacggcccattcgtagagctggtcgaaatagtccgacgcataacgctccagctcccactggaagccgagccactggatgtcgcgcttgatcgagtcgacatactccacgtcctccttgacggggttcgtgtcgtcgaagcgcaggttgcacttgccgccgtatttcttcgccagtccgaagttgatgcagatgctcttggcgtggccgatatgcaggtaaccgttcggttcgggcgggaaacgggtctgtatgcgcgtttcgcccccggcgatcgactcttcgatgatctcttcgaggaagttcagcgacttctcccgtgtttcgtttgtttcgcttgccatattattttttatgattcttgctgttgtaaacggttttgagcagtttcacccccacgaccagcatttgctgggttcccagggccgtgccgtcgtggtgggcggcgaactccgcgcggaccgagaccgtgtcgtcgaagaacgagcggcggtaggagagcgccgtgcggctgtacaccttctggtcggtgcggaagaaactctcggcggggtacaactcgcggccgtaagggagcggtgtgccgtcttcgagttcatgtccgtagaagaaggggtggatgttgtccccgacatagaggcgttcgtcgagcgacagtccccagcggctgatccggaaggcgaactcgcccatgcagggcttttcccacgagtggccgaaactgcggtcgcgctgggccgtgagcaaagctcccagtttgatgtcgaaatcgaagaaggcgttgaaccgcacgccgacgcagggggtgagcagttgcaggtcgacgacgttttcgatcggcgcgccctgctgtcccgcatagtggaacatcgagtagttgaacccatagtagaacgtgtcgaggtagtggcgtccggcgagcaggatgcggaacttttcgcgcgagagggtggaatacatgccctcccagtcgcagacgaactcgacataggagtcccttttgccgttgtactgcgccagcacgccgttcatgcggttgtggaagaagcgttccgactcggagaagaatgccgtcgaatagtcgtcgtcgtgcatcatgtcgcgcgtgaagataccggctgcggccgtcaccttgggcgtctggaactggtagtagaagacgggtttgatctccgaaagataggccgattcctgggttccgaaattcttgatcatgtccgcggcgatgaccagcgtgtttttctcgtcccaccggatgccgacacggggcgtcagccgggccgcgaagtccgtgcccgattcgatgtccagtcccggcacggcgaactcgttgctgccgaattccttgttgtcgaaatacattttgaaatcggttcccagcagaatctcctgtgcgtgtcctgcggcgacgcatccggaaagggcgagcaagagtaaaagttttttcataggtgtcaacggaatatagctgacaaaagtaaggaaaagattttaattttatttacttttgcccccgaaatcaatcgttccgaacccattatgcgcaaaatcaccaacgaagaactcggcaggccttcggccgaggagttcgccgcgatggaaaagatgcctgtcacggtggtgctggacaacgttcgttcggcccagaacgtcggggcctttttccgcacgggcgatgctttcgccgtggagcggatcgtcctgtgcggcatcaccgccactccgcccagccgtgacattcacaaaacggctctaggggccgagatgaccgtgccctggagttattgcgcttcgaccgtcgggtgcattgcgcagctgcgtgccgaaggatatgcggtctacgccgtggagcaggtcgagggggccgtgatgctcgatgagtttcgcgccgtgccgggggtgaagtatgcgctcgtcttcggcaacgaggtcgacggcgtgggggaggaggccgtcgaccggtgcgacggggccgtcgaaatcccgcaggccgggaccaagcattcggtcaacgtctcggtgtcgggcggcgtcgttttatggagtttcttttgccaaatccgtccgaagcgttaactttgccgcgttgtaaaacttaaaatctgaaaaaatgtcagtagaaagcaccgtccgcgcggtaacgacttaccgcctgacggagatgaaacagcggggcgagaagatcgccatgctcacctcttacgactattcgatggcgaagatcgtcgatgccgcgggtatcgacgtgattctcgtgggcgactcggccgccaacgtgatggccggttacgagaccacggttcccatcaccctcgatatgatgatctaccacgcccgttcggtcgtgcgtgccgtggagcgggcgctggtcgtcgtcgacctgccgttcggaacctatcagggcaactcgaaggtggcgctcgattcggccatccgcattatgaaggagaccgaggccgacgccgtgaagatggagggcggcgaggagatcctcgaatcggtccagcgcattctctcggccggcattcccgtcatgggacacctcggcctgacgccccagtcgatccacaagttcggaacctacgccgtccgcgccaaggaggaggccgaggccgaaaagctgctgcgcgacgcgcacctgttgagcgaggcgggctgtttcggcatcgtgctcgaaaagattcccgcggcgctggccgcgcgcgtgaccgccgagattccgaccccgacgatcggcatcggcgccggcgcgggctgcgacggccaggtgctcgtgatccacgacatgctgggtatcaacaaagggttctcgccgcgcttcctgcgccgctacgccgacctgcacacggtgatgaccggtgccgtggagcagtatgtcagggatgtgaaggagtgcgatttccccaacgaaaaggagcagtattagtccctgattccttatacacgcaagccccggctggaacatttcagccggggcttgcgttgcagaaggctaaagaaggctatttgatcgtcttgtgcagggcctcgtagaaatcgggtccttcgcccgcgtattttccgatgatgaggccgtcgggaccgatgatcaccttggtggggtatccgctgacagcatattcgacggagatgtcttccgctgccggaacgtctttcggattgtagacgttgatccacggcagccggtgttcttcgaccgcggcgagccatctctccggagtgtcgttgcagtcgatgccgactatttccagtttgcttttataacggtcgtagtatctcttcatcttcgggattcctttgatgcaccatccgcaccagctgccccaaaagtcgagcacgacatactttccgcgaagcgacgagagggtgaaattcttatcgtcggcggttttcagcgtgaagtccggagcggggctgccggcgacgatcttcgcttcggccagccggatcaggcggtattttccggctttggccagcagcggttcgagcaatggcctaaatatcgagttgcgggccgcatcggcgagtcgttcgtggtatgttaaaacgctgtcgatgggtattttcgtcaggcagtaccctgcgagcgggttgtccggattggcgtcgatgtagttcatttcgcaagcccggcggcgggccatcacctgccggaaccgctcgtagagcgcttcctgttccgcgcggctttttccggccatggcatcctgcaatcgctggccttcgatccagaaggaccgcaattcctgataatggcggctgtgatcttcgttgagacgtgtgcccgaaagcgtgcagttgaaaaccgtcgagtcgatccggccccggagtacggcgtgttcgcccttgtcgaggaataatttcatgtccgaagtgctggtcgaatggcgtcttccctgatcgaattccatgagctgcatggggatgatgatgaattgtgtcggccgctcgacgggcgtgtcgtatgcaaatcgcccgttggcggcgacgatcgtgtcgtaggagatccgttggtcgtcatctcccttgaggccgggcatatcttcgatcgcgcagtgcacgatgcagagtgaatcgttggtcaggctgtcgatatgccccgtgatcgtatgtcggggtgcgcagccggcgacggcggccgcaagcaggaggagcaggtctcttttcatttcgggatggtgggtcgattttgcattcaaagataacacaaaaagtcttacgccgaacctattgatagaatgttgataaaaaaatcggcggataggtccggaaattaggccgtttcgaaaaaaatcactacatttgcgagcaacaaaaatccacgttcattatgtcttttatcaatgaaagggttcagcccgaaggacttaccttcgacgatgtgctgcttatacccgcctattcggaagtgttgccgcgagaggtcaatgtccagacccgtttctcgcgaaatatctctctcaacatccccattgtgtccgccgccatggacacggtaactgaagcgccgctggccatcgccctggcgcgggaaggaggaatcggcgtgatccacaagaacatgaccatcgccgagcaggccgcgcaggtccgcaaggtgaagcgcgccgagaacggcatgatctacgatccggtgaccatttccaaggaccacaccgtcggcgacgcgctgaacctgatgaaagagaacaagatcggaggcattccggtcgtggatgcggacaggatgcttatcggcatcgtcaccaaccgcgacctgcgtttccagcgcgacatgtcgcgccgcatcgaggaggtgatgacgcccggcgaccgcctcgtgacgacgcacaatcccgaactctcccacgcccaggaaatactgctcaacagcaagatcgaaaagctccccgtggtggacgacgcaggccgtctggtggggctgatcacttataaggacatcaccaaggtgcaggatcaccccaatgcctgcaaggacgcgaagggccgcctgcgcgtggcggccggcgtcggcgttacgcccgacgcgatggaccgcgtgaaggcgctggtcgccgaggacgtcgacgccgtggtgctcgactcggcgcacggccattcggccaacatcgtttcgatgctcaagcggatcaaggaggtttatccgtcgctcgacgtggtggtgggcaacatcgccacgggcggggccgcgcgctacctgatcgagaacggcgccgacggcgtgaaggtcggcatcggtcccggttcgatctgcacgacgcgcatcatcgcgggtgtgggcgttccccagctgacggccatctacgacgtggcctgcgtggcccgcgagagcggcgttccggtgatcgccgacggcggactgcgttattcgggcgatctggtcaaggcgctggctgcgggcggcgactgcgtgatgatcggttcgatgttcgccggcacggaggaggctccgggcgagacgatcatcttcaacggccgcaagttcaagagctaccgcggcatgggctcgatcgacgccatgaaggccgggtcggccgaccgctatttccagaagggctgcgaaggcaacatcagcaagctcgttcccgaaggcatcgccgcgcgcgtgccgttcaagggctccctttccgagacggtttaccagctcatcggcggcgtccgttcgggcatgggctactgcggcgcgaaggacatcgagacgctcaagcaggcccggttcatccgcatcacggcttcgggcatgcaggagagccatccgcacgacgtagccatcacgagcgaggcgcccaactattcgagcgaacggtagatgggactcccggtttcgaaatacgactggtggattctggcggcggcgttcgcactgttcgccgcatggctgatcacccgccttccggtgctgcgtacgctggtccttgcggcggcgttgggttatcttctccggcgcgtgtgggtgggctatcgaaattttggaaagtaattgaacgactgatatggaaaaaatcctgattctcgacttcggatcgcagtacacgcagctgatcgcacgccgtgtccgcgaactgaacgtctattgcgaaatccaccccttcaacaaaattccggcgatagacgcgtcggtgcggggcgtgattctttcgggcagtcccttctccgtgcgggacgcacaggccccgactcccgacctttcggccatcaagggcaaactgccgctgctgggcgtctgctacggcgcgcagttcctcgcctcggctttcggcggcgaggtgcagcccgcgcccagccgcgaatacggccgtgcgatgctcaccgtgggcgacgcctcggatgcgctgatgcgcggccttccggcccgcacgcaggtgtggatgtcgcacggcgacaccattacgcgcgtgcccgacaactatgaactgatcgccagcaccgaggacgtgcgcgtcgccgccttccacgtcgggggcgagcagacgtggggcatccagttccaccccgaagtgtaccattcgaccgacggcacgcagctgctcaaaaacttcgtcgtggacatctgcggctgcgggcagtcgtggacctcggagggttttgtggaggctaccgtgcgcgaactgcgcgagaagctgggcgacgacaaggtcgtgctggcgctttcgggcggcgtggattcgtcggtggcggccgtgctgctgcacaaggccatcggcaagaacctctactgcgtcttcgtcgactcgggcctgctgcgcaagaacgagttcggggaggtgctggagtcctataagcacatggggctgaacgtcaagggcgtgaatgcctcggccaagttcctgggcgatctggcgggcgttacggaccccgagcggaagcgcaagatcatcggccgcgacttcgtggaggttttcaacgaggaggccattcagatcaaggacgtcaagtggctggcgcagggtacgatctatccggatgtgatcgagtcgtgttcggtcaacggcccttcggccacgatcaagtcgcaccacaacgtcggcgggcttcccgagaagatgaacctgaagatcgtcgagccgctgcgcctgctgttcaaggacgaggtgcgccgcgtgggccgttcgatgggcatttccgaacagctgatcggccgccatcccttcccgggaccgggccttgcgatccgcattctgggcgacatcacgcccgagaaggtcgaaatcctccagaacgtcgacaaaatctatatcgactcgctgcgcgccgccgggctgtacgaccaggtgtggcaggcgggggctgtcctgcttccggtgaagagcgtcggcgtgatgggcgacgagcgcacctacgagagctgcgtggccctgcgcgccgtgacctccacggacggcatgacggccgactgggtgcacctgccctacgagttcctggccaacgtgtcgaacgacatcatcaacaaggtcaagggggtcaaccgcgtagtctacgacatctcctccaaaccgcccgcaaccatcgagtgggagtagggggattcccgttatgaaaaaggaccgcatccgcgggaaattcactgttgtaaacgaggtttcggtttccagaccgtcgcctcgtttgcttttgtttatatgcatcgttctgaactgcaatccgcagcgggcgtttcgcctattccgaccgtcgtcatggaaattccgaaagaggtctgcaacctcaaggaccgccgcagcgacctgtacgaggtgcgggtgaaaaaatgaaggacacggtgacgggcttgaaaacggggagcgcatgcgggccttgattgtcggggcctgatgcggccgggcattatgccgcagtgtacgcgcattttttgtttaggacgggctatggaaaagccctgggggcgatgcccgatatgattgtttcgctgtaaacagcgtgcatggctttttgtgaatcttcttgccgcatggctaaataatgagccggcgcagacggtagacgtaatggtctacggcatgcagtccggcagcgaaaccttttctgtgcacccttgcaacgagtccggcaacgcccgaaataccgtatgtgacgcaacacattgataaaaacgcagcacgcgagcgcccttgggctccgcgctggaacatggatacggacgtgcgtgctttttcgcactcctgcaagacaccggtaagacttaaatcggaattatagacgtattcacattgccattggtcggcaagtaaattccccccccccacgggttaggaacgtttcattcgtgaatttccatggagcgtccggcctgttccccgactccttgcagagcaggcaggccatgaaaaccgttagcagtatgaataccgatttacgcattccgacaaactgaatccatatacaaaattaacggttcatacgggaccggcaaatttttcggcgatttatgccggaaacggagatgaatccgtccgaatgcagcatattgccgtatgcttcgatcggattctgttcgggaatgggcgagaaggcgagagactgcatgttgtaattcagcatgatgcgcaatgaaaggcaaaaaaagtaaacgaggcgacggcctggaaaccgaaacctcgtttacgatagtcaatagtgaactctccgcggatgcggtcctttcttgccgctgcggggttatttcaccgagacgggcagcgtggcggcgatgtcggccgacgaggttcccagcgaaagggtgtattcgcccgggttgaccttccagccgcgcgactgcgtgtcccagaacgccagcgcctgccggtcgagttcgaactccacgacggcgcttttgccgggggccagggtcactttccggaagcctttcagctcctttttcggccggaggaccgtcggggcgttctccgtgacgtagagctgcacgacctccgcgccctcgcgatcgcccgtgttggtcagcgtgacgctcactttcagcggcttgtcggcggggaacgccttcggggcgcggggtttcgaaagctcgaacgtggtgtacgaaagtccgaatccgaaggggtagagcggtgcgatgcccttggtctcgtaccagcggtagccgaccagcaccgactccttgtagtcgatgtcgtagagctggatcaggcgttcgttgtaggcgcggggcgccttgttgtagaactccgcgccggcgggcatcgtgcctttggcgggggagtcgttgaactccttctcgatggtcatgggcagtttgcccgagggcgacagtttgcccgaaagaatgtcggccagcgccgtgaagccgctctggcccggataccagccgtagatcaccgctgcggctttgtcgttccagccgcccatgcggattcccgaacccgagttgaccagcacgatggtgttgggattggactcgacggccgtgcggatgaaggcctcctcctccttgggcagcgcgaaggggcgttcgaacgactccacgtcgatcgtgcccgtcgagagcagcaccacgtcggcggcggccagctcctcgcgggagggtttttcgacgacgcggaccgcatcgccgtagacctcgcggagcgccgcggtcagcgtcacgttgtcgtagcccagcacctcggccgaggacgacgtgctgcctcccgtgcggggaatctgctcggtgaagcgtcccgtcagcaggattttgcggccttcggcgaggggcaggatgccgttgttgcgcagcagtacgatgccctcggcggccacgtcgtagccggtctgcttgtgcgccgggaatttctccagcagggcgggaacgtatttctcccggtcgtaaagtccgaaggcgatgctcgtggcgatgttggggcggatcattttctcaatgtccttttcggtgatgcggccctccttgagcagcgcgcgcacctcgccgaagaactccttgcggcccggcatctcgacgttctggccgctcttgaccaccttctccgtgtcgttcaccgacgaccagtcgctcatcacgcagccccggaatcccagctcgccgcgcaggatgcgccggatcaggtcggcgttctgcccggcccactcgccgttgaggcggttgtaggaggtcatcacgtaacccacgccagcgtcgatgccggccttgaacggcggcaggtagagttcgtgcagcgcccgttcgtcgacgatcgagttcgagcggcggcggtaaaattccgtctcgttgcagatgaagtgtttcagacacgccacggttcccgtcgactgcatgcccttcacatactcggcgaccatcgccgaggcgagcagcggatcttcgcccatgtattcgaaattgcgtccgttctgcgagttgcggtagatgttcatgcccggacccagcaggacttcgatgcctccggcgcggcactcttcgcctacggcttcggcataacgataggccagcgacgggttgaaggtcgctgcgagggagatcgggcacggaaaggccgtcgaacgctccagctggcggaccatcgtcgggtcggacaggttgtcgcgcatgtgcacgccctgcgtggcgtcggagagatagatgtagggcatgcctttctcgggcacgccgtagaagaagaacgaggagtagccgcgcatgaacgagatcttctcgtcgagggtcagctgtgcgatccgggcgtcggcctgccggtaggcctcgtcccacgctacgacctgctgggcggcggccggtgcgatcgccgcggctgccgttgcgaaggcgagcaaaagttttacggaggttttcatcgttttttgaattggtttgcgtttctgtcttctgcaaagttagcgcatgaacggcccgccggaacggctcttcggaaaaatataaatgatatgaactgtcagttttctgaaaaccagttgattgatgcttcagatggcgttgaattatacaaataaaacaggcctgataatttgcttttgcatgctttttatcgttatatttgtgcaaatccgttgcctgaaatgaaaaaactgcctctccttttcgcggcctttctcgtcgtctccgcatccggtctgcgtgccggggaaccttcggacatacatacgctgcttcgccgcctggacggtctgctcgaccgccgcgaggagttcctgctccgtcacgaagcgcgcctcgactcgctcaaatccctgctatgcggcgacaccctcgggttcggggcgcgttatgccgtcacggcggagatcgcggagcgttatttcgcctaccagagcgactcgacgatcgcctacctgcgccggaatgtcgcgctggccgaaagggcggggaatgccgacctgacgatccgcgccaaatcggtcatggcgatgtgttacagcatgaacggccgcttcctcgaagccgaccgggtgctggccggggcgaccgacacgctgcatatgagccgtgcgacgcaggcggcctattatgccgcgcagcatcgccagaaccgcgagtgccgcagccagagcgagccgggggcggagcgcgaccggtttcgggcctgcgaggagtactacgcccgccgtgcgctggaaaccaccggcgacatttcgaaacgtttctatttcgcctacctcgtcgccgtggacgaaggggattacgaccgtgccgccgcggcctgcgacagtgcgttggcatgcgctccgcccgcgtcgcacgactatgcccgggcggcgttctaccgttcggagaccgaaaggttccggggcgacgaagcggctcgtttcgaatggctcgtgcgcgccgccatggccgatgtgcagggggcggtccgcgactacggcgccttgggcggcgtggccgaagagctgctgcgccggggcgacgccgcacgggcgatgcggtgtatccgcgttgcgatcaacgacacgcaggcctacaattcgcctatccgttcgtggcgcgacatggcgattctgccccagatcgagcaggcgtacagcgagcgcaatgcccgtctgcgcgcgatgtacgtcgcgctgatccttctggcctttcttttcgccctctcggcaatcggaggcgtgctgttcgtcctgcgccagaaccggcggctcaacgccgtgcagcagaccctgcgcgagtcgaacggaaaactggccgagctggctgcgagcctgcgcgaaaccaatgccgacctgagccggcagaacatccgcatcgccgacgccaaccgcatcaaggaggtttatatcggcgggttcctgaagacgatctccgaatatatctacaaactggccgacacctaccgtcatgtcggccggatgctgcgcgacggccgttccgacgagctgcgccgcgagtacgccggaaccgatgtccggagcgacgaactgaaagagttctaccacaatttcgacaccaccttcctggggcttttcccctcgttcatcggggagttcaaccgtctgctcgccgacgatgcgcgcatcggggtccgtcgtccgggaagcctcacgaccgaactgcgcatcttcgcgctggtccggctgggcatcaccgacacggcgaccatcgccgcactgctgcactgttcggtcaatacggtgtacagctaccgttcgcgcatgcggttgcgttcgctcgttccggagcgggatttcgaacagcgggtgcagtccatcggtctcggggacgatgccgcggagctttccgggacctgatcggaacggggcctcttgtcggcgaaacacggagttttttcgctcggggtgtacgctccgacgcggaaatgcgtatatttgcagcacgcatataccgatacgatgaaagattttgcagccatagatttcgaaacggccaacggcaagcgcacgagcgtctgctcggtgggcgtcgtcgtcgtgcgcggcggcgaggtggtcgatacgttttaccgcctgatccgtccccgtcccaatttttacagccatttcacgacggccatccacggtctgcgctatgaagatacggctgatgcccccgatttcgcgtcggtgtggcgcgaaatcgaaccccgtatcgaggggctgccgctcgtggcccacaactcgcccttcgacgaaggctgcctgcgggccgtcttcgaactgtacggcatgccctggcccggttataccttctactgcacctgtcgggcctcgcgccgcaccttcggcagccgcctgcccaaccatcagctgcacaccgtctccgccgcctgcggcttcgaactcgaaaaccaccaccacgcgctggccgatgccgaggcgtgcgcgcagattgccctgaaaatcctgtaatatatataggtgtcgcccgagaagtctgatttttacgatttcacccctgccggagagcttccggcaggggtgacttttttcgggggacttttcggacggatttttcggacggcctgttctctccgtcaaagccccagctccagctggaagcggatctcccagcggttgtaattggggtctatggacctgctccgggtgttgtacgacatgtcggcctgcactttgaggctgtggccgatgatgtagcgcgtgatgcccagcgtggtctggttccagttgcggtatccggccagcggctgcacttcgctgtccgggaacagcgtcgagttgcgcagggcgatttcccattttttgttgaacaggtagctggtctgcacgttgagaccctgcccgttgtagacgaaggctccggtttcggggctgaacagcgggtcgctgcacgaacggcccatgaaatcggtgtagaaggcgaagccccggtattcgaggatgaaatcgacgaaataggaccccaggttgcgtgtggcgtcgccgggcatcacggctccccgctgacccttcagccgcgaggccttgtggttgtaggagtaggctccggcgagcagaatcttcacccgctcctcgaattcgtagttgccctcgatgacgtcgcccttcgacttgaagcgtcccagcggatagagttccagacgccccgtataggccagccctccggtcggcgaactgccccagttgcggccttcgcccagcgtgacggagccctttgccgagaggttgaagccctcgccgtggcgcatgttgtattcgccgaagaacccgaagtcgcggtcgaggttgaattcgctgttgacgatgctccggtcgacgaattgcagggcgctcgacgagttgatccgcgcgcggttggccttgatcttggtctgcccgaagccgatgttccaggtggcgttgggcacgtagtagacgatggcgtcgcgcacgatgttcatgtcgccgtcgggcagcggctctgtgtcgtaggaggtgaatcccagctggaccgagtagaccagtttgggcgaatagatgtaaccgtcgaagcgcagccgcagccgtttgacgcgggcctcggtcttggtgagcgtgaagtcgtcgtcgaacgacagcgccagaaggttctgcatgcggaagcgcatcgtcagttcgaaccagtcgtttttgggccggaaggtgatgcccttgccgatctcgatgttgggcatgttgcgcagctgtgccagcagttcgccggtcgaatcggccacgatgatttcggtgcggaggttgcgtttctgcgccgcagggacctgcggcctctcctgtgccgcggccagcgaccagcaggcggtcagcaggagcaggatcgggaattttttcatcgtatctttctgttaattctctttcggttgcgtgtcggacaaaagtacaaaaaatatgcagagtccggagaaccgcgatgcaaagttggggcgtaaatctgaaacgaatttgaaatacgggggcggcagaggactttcggcgggtaaaaagatgcggcggaagagataaaatccgaaaaaataggatttctggaataaaatgtgtatctttgttgccaaacaatcgagttttgttttgaatctttctttgtaagtgtttgatcccgcagtccatcgcggtttcccccccccattctcaaaatcgacctcattagcttgctcttttgttgggagcggtgcgccttgtgcgcttcggtatttgcaaaaaaaataattgataaatggccaaacgaattacatcgggaaagagagaaagagagaaattaaagcagaccaaacgtcaggacaagcagaagaaaaaggaggagcgtctgagcggcgggagccgcagtttcgaggacatgctggcgtatgtcgacgaaaacggcgtccttcacacgaccccgcaggatgtgaagcccaaggaggagatcgacgcctcgcagatcgaaatttcggtcccgagacagtcggaaatcgaggaggaggagccgatgagcggccgggtggaatatttcaccgcatccaaaggctacggcttcatcaaggatgccgccggttccgagaaatacttttttcacatcaccaacgccccggcgggcattgccgaaggggaccgggtgacgttcgaactcgaacgcggcacgcggggaatgaatgcagtacgaatagttatcagtaacaaataacacttttttaattaacttatcaagagaatgaacatttatgtttcgcatctgagctggggcacgagcagtgagggcttaggaaatttattcatgcagttcggcgaagtagcgtcggctaacgttattaccgaccgggagacgggccgttcgcgcggtttcggcttcgtcgagatgcccaatgaggaagagggtcagaaggccatcgaccagctcaacggaaccagcttcgagggtcagacgatcacggtcaacgtggctcgtccccgcgaggagcgctcttcgggcggctacggcggcaatcgcggaggcggttacggcggcaaccgtggcggaggctacggcggcaacggcggcggttacggtcgcaaccggtactaattccggattttatttcagaacggatctccgggagagcgtttctccccataccatacggagcggggcggtttttaccgccccgttttttgtttttccctattttccacacgcccagcgacatcgggaaaaagagcgaaaaattacccgcgggacctctgtttttcccgaaaaaagcgataacttgccgccatgaaggagacggtgctcgaaaaactcaaggtgctggccgagtcggccaaatacgacgtttcgtgcgcttcgagcggcgtgacgcgcaagcatcgtgcgggcggggtgggcagcgccgcggggtggggcatctgccactccttcacggccgacggacgctgcgtctcgctgctgaagatcatgctcaccaacgtctgcatctacgactgcgcctactgcatcaaccgccgcagcaacgacattccgcgcgccgccttcacgccgggcgaactggccgaactgaccatcgagttctatcgccgcaactacatcgaggggcttttcctctcgtcgggcgtcgtccgcgatcccgactatacgatggagcgcatggtccgcgtggcccgcgacctgcgcacggtgcaccgtttcaacgggtacatccatctgaagagcattcccggtgccagccgcgaactggtggccgaggccggacgctacgccgaccgcatgagcgtcaacatcgaaatcccgaccgaacgcaacctgcaattgctggctcccgacaagaattacgaaagcatctaccgcccgatgagctacatccagcagggggtgctccagagcgccgaggagcgtacgcgcttccgccatgcgccccgcttcgctcctgccgggcagagcacgcagatgatcgtcggggccacggacgagagcgaccgcgacatcctgctgctctcgtcggccctctacggacggcccacgatgaagcgggtctactactcgggcttcattcccgtcaatccctacgacaagcggcttccggcgctcgacaaggcgccgctcgtgcgcgagaaccggctctaccaggccgactggctgatgcgtttctatgggttccgcgccgaggagatcgccgacgagcagacgccccggctggatctcgacatcgaccccaagctggcctgggctttgcggaatcccgcgttttttcccgtcgatgtcaaccgtgcggactacgaggctctgctgcgcgtgccgggcatcggggtcaagtcggcccggctgatcgtctcctcgcgccgctaccggacgctgacgcagcagtcgctgcggcagatcggcgtggtgatgaagaaggcgcagtatttcatcagctgccgggaacttactgcggggcagggcgtcaacgaactgcgccccgagcaggtgcgccgcctgctgaccgctccgcagcggcggaaaacgggtaataacgaaggccaactgacccttttctgacgcgatgctggttttccgatacgacaaatccttcgacgggctgctgtcggctctgttcgatgcctactcgatgcgggcgtttcccgaggcgctgatcggccccggggaacccgaaccgttttttacggagcgcgtccacgacgttgcgaccgacgaggcgcatgccggccgtgtgtggcggggactggaacggcggctgaccgcccgcacccgttcgatgttcgtctatgcctggcacggggagcagccgcagggcgacctgctgatgctgcgctgtctgcgccgtgttttcgacgagggcggaggcgtcgtggccgaccaggccgatcccgacatgaagtcccttttccagttggcgctcaaggtctcccacgagcgggaacgtctcaaacagttcgtccgcctccagaaagccgccgacgggacctatttcgccgccgtcacgcccgagcacgacgccctgccgttggcggtggactatttcaccgaccgtttcgccgaccagcggtggctgatctacgacaggcggcgcgattgcggctactattacgacgggcatacggcgcggtgcgtcacgctggaggacgaccggggaatgatcgccgacaaacttgccgacgaatggctcgccgaggacgagcggcagtttcagctgctgtggaaaaactatttccgggcgctggcgatcccccggcgcatcaacgaacgccagcagcgccgtatgatgccccgtcgttactggaagcatctgactgaaatggagtgaccggccgggacggggaggccggttttcggtcagacatgcaggttgaacagcttggcgatgcccgtcacgacgatctggacgccgacgcagaaggtgaagaaggcgaccatcttgttgatgacgatgctgccgctgttgccgattttgcggatgatccgttcgccctgcgacaggaacagataaagtatcaggcacatcagtacgatgaccagcgcgatgatcgcgtagaagagcaggccccgcgcccagccgttcttcatgctgaccgacgccatcagcgtcaggatgaccgagacgctgcccgggccgatgctgatgggaaaggtgatcgggtagaagatctgcgactcgatggccgatttgtgaatggggttgacgtccttgccctgcgtccgtcccaccgaggagtccgaatcgccgagccattgcagggcggtgcggcagatcagcagtcctccgcccagttggatgaccgggagcgaaagcccgaaaagcgacagcacgaaatgccccacggccaggctgcccagcccgacgagcagatagtcggtgacgattctgcggatgatcgacctgcggtcctcgtcgttcagccccgacagcagtccgttgaccaggaatccggctcccaccgggttggccaccgggaacagcgccatgaaggcggatatgaacgtgaacagaaacccttcctttaacatcttgaggctcggaactttgtattgcaggcttgagtctggcaagaaccgttccaaaccttccgtcctccgggcggagccatatcgtccggaggcggaagccgttcggtttccggatcacgcgtaatcccggtctccaacgacgacaacaatcgcagaccggaaaagtaaaaccctgcaagtcgttgatcttgcagggttttctgttttatagccgctttgcgtgtcggcttttgcggagaggacgagattcgaactcgtggtacaggttgccccgtacgtcggtttagcaaaccggtggtttcagccactcacccacctctccggacacgccttccggctgttaactccgaaagggtgtgcaaatatagaatctttttagggaaatacaaagaaatgcggtcaaaatttgtatttttgcgtaaatcctcgaccccggtttgaaacgcacccgttgcatattacatatggtgtgctgcttttgtcgcggtatccgccgcagcgcagcctgcgccggaaaaccgcctcgtgcggccgctcgccgaggtgctgcccgaagctgcgccgtgcgctttcccgggcggactgcccccggcggctctcccaagctgtgcacgaccggaacgaatcatcgaaaactggaatagccatgaaacggattctcttgcttttgctggccctcggggccgtttgcagcctgaatgccaaaacccggaaatgcctctaccgtgtgacggtcacgggcaagcgcgccgaatgtccggtcgtgatccgcgatgtgcccgagtgggcgcagagcgccgtcgtgtcgctcggcggcgttcaccggattccctcccagttggaccgggaactgggcgaactggtcttcgtctccggcatttccggcagccagaatttccaggttctctactcctcggaccccgacaagcgcgttttcaaaaaacgcgtacatgcccagatgtggctcaagaaccccgacaagaccctgcgagccgtcggctgcgcctcctcggagaagaacgacatgtaccataaactgcaccaccacggcccggccttcgagtcggagtacgccgcctaccgcatctatttcgacaacaagcagaccgtcgacacctacggcaagaagcgtccgcagctcgagctggccgagacgatgtggtatccttcggacgagcagctctcccgcggctacggccacgacaacctgcgcgtcttcgggtcggtgggcgtggggacgctcaagggctgggacgccgaaaagagaaagatggtccacatcaccgatttcaaacgccgcgaagcgcgcattctggccgacggacccatccgcacggtggtcgaaatgcgggtcgaagggtggcgctacggagggcgcgagatcacgatgacctcgcgctacattctttacgccgggcacggcgacgtgcaggtcgaaaaccgcatcgagggcgacttcaggggactggtcttcacgactggcgtgatgaagatggccgaaagcgaggtctgtaagaacgataacgtgatcgccgccttcgggcgcgacttccccgaaaacgacaccgtgaagtgggagcgcgagagcgtcgggctggccgtcgccgtgccgcagaggcagatcgtctcgcagaccgacgacaagaccagctacctcttccagctcacgcccgatgcccgcggacggatcgactacgcgttcgagatgatctggcgcaagagcgaatggctcaaggaccgcagcgataccgaatgcgtcctgggactgatggagtcggtgggtgcggcccggaccccggtcgtcgtttcgcggatcagacagttttgagaaaaagtgcatcgtttgcgtcaaaaaatccctgtccgataagcgggggcagtgtacttttgtatacctgaaattgcgaaaattttacgtatacgaataaaaccacctctcttatgaacttcagacaagtgacgatttgcgcagccgcggcgctcctggcagccgccgcaggatgccgcgcacacgccccggcctgcaaccttccgttcgagatgccgcaggtcgcccggcccgcgattccttcgaatacggtcagcgtcgccgatttcggcggctcgggcgacggcgacgcgggaaccggctatgcgatgaccctctcggtcacggcgggtgtgctctcgcccaacatcacgggcctgccgaccagctgggctgccggcgacagtacgtggacggcgaccgacgataccggggccgccaggtagccggaaggcttcgcatgaaagaggcgcggaacgttccgcgcctcttttttgccgtttgaccgttgcggaaccggatttgcaggggagatggtaaaaatgtaaatggaattttgtatctttgcatgatatttcgcttgtaatggcagaaaacgagaaaaacatactggagaatatcggagagcaggaatacaagtacggcttcacgacggacatcgaaaccgaaaccatcggcaagggtctttcggaggaggtcgtgcggctgatctccgccaaaaagggcgagccggagtggatgaccgagcggcgcgtggcggcctaccgccattggctgacgctggagcctccgacctgggcccacctgacgatccccccgatcgactttcaggacattatctactacgcggctcccaagcccaaaaagcagctcggttcgatggacgaggtcgaccccgagctgaagcgcacgttcgacaaactgggtatcccgctcgaagagcagatggctcttgcgggcgtcgcggtcgacgccgtgatggactccgtgtcggtcaagaccactttcagggaggtgctggccgagaagggcatcctcttctgttcgatctccgaggcgctgcgcgactttcccgagctggtgaaaaaatacctcgggagcgtcgtgccctataccgacaacttctacgctgcgctgaacgccgcggtcttctccgacggctcgttctgctacatccccaagggggtgcgctgcccgatggagctgtcgacctatttccgcatcaacgccgctggcacggggcagttcgaacgcacgctgatcgtggccgacgagggcgcctacgtgagctacctcgaagggtgcaccgcgccgcagcgcgacgagaaccagctgcacgccgccgtggtcgagatcgtggtcgagcgggacgccgaggtgaagtattccaccgttcagaactggtatcccggcgacaagcagggccggggcggcatttataacttcgtcaccaagcgcggcatctgccgcgagaacgcccggctgtcgtggacgcaggtcgagacgggttcggcgatcacgtggaaatatccgagctgcatcctcgcgggcgacaactccgtcggggagttctactcggtggccatgaccaacaatttccagcaggccgacacgggtacgaagatgatccacatcggccgcaacacccgcagccgcatcgtctcgaagggcatttcggcgggccggagcgagaactcctaccgcggcatggtccgcgtggcgaagggggcggagaacgcccgcaactactcgcagtgcgattcgctgctgatcggcgacaagtgcggggcgcataccttcccggtgatcgacgtgcgtaacccgacgggtgtggtggaacacgaggccacgacctcgaaaatctccgacgaccagctgttctactgcaaccagcgcggactctcgacggaagacgccgtggggctgatcgtcaacggctatgcccgcgaggtgctggccaaactgccgatggagtttgcggtagaagcccagaaactgctggctctccagttggaaggcagcgtagggtagtttgctgtttgcgtctgcaatccggtcgcatgcgataagcccctcccgagggaggggtttagggtggggtcaggcttgcaaacacggcggaacgccgtggaaacgacctgcgagagcgaaaaaaggaaacgagaataatagtaagttgatgatatgttaaaggtaaaaaatctgcacgcctcggtcgacggcaaggagattctccggggcatcgacctcgaagtcagggccggtgaggtgcatgccatcatggggcctaacggctcgggcaagtcgacgctggcgtcggtgctggcgggcaatgagaaattcaccgtcaccgaagggtcggccgagtttctgggccgcgacctgctgtcgatgcccatcgaggaccgggcgcggctggggctgttcctgggcttccagtatccggtggagatcccgggcgtcacgatggctaattttatgaagctggccgtcaacgagcagcgcaagttccgcggcgaggagccgctttcggccgccgaattcctgaaactcatgcgcgagaagagcgccgtggtggaactctcgtcgaaactcacctcgcgggccgtgaacgaaggcttctcgggcggcgagaagaagaagaacgagattttccagatggcgatgctcgatccgaagctggcgatcctggacgagaccgactcggggctcgacatcgacgccctgcgcatcgtcgccacgggcgtcaccaaactccaccgggcggacaacgccacggtggtcatcacccactaccagcgtctgctggattacatcgtgcccgatgtggtgcatgtgctctacaagggccgcatcatccattcgggcgacaagtcgctggccctcaagctcgaaaaagaggggtacgactggctgatcaacgaatacgacaagtgatggagacgattcccgacatcatccgcgggttccgcgcggcggacggcgaggtgctccgcatcgccggggccgaggccgaaccctttgcggcggtcgatccccggcatctgcgcgtggaggccgcggcgggcgcttcggcgcggatcgtcgtgctgcataccgcacccgacgtgtcgtcgctgacgctgacgctggccgaaggggcgcagctggagctgaccgaactgttcacggccgaggcgttcgccgaggtctcggtgaagcaggccgcccgcagccgctgccgcctgacgacggcgctgctgtcgagcgccaacgcttcgtaccgcatcgacctcgacggtgcggatgccgaaaacgagctgggcggggtgttcctcgccgcgggcaatgagcactgcgtggtgaaacttcgcacgggacacaatgtcgccgattgtcgcagcaattcctacatcaaaggtgttgccggcgggcaggctgtcggggagttctgcggactggtctacgtcgctcccgacgcccagcgcaccgacgcccgccagcagagccgcaacatcctgctgagcgagacggcccgcatcacgacccagccgcagttggagatttacgccgacgacgtgaaatgctcgcacggcgcgacggtggggcagatggatgccgaggcgatactttacatgcgccagcgcggtttgagcgaagcccaggcccggcggttgcagatcgaaggattcgtcggcgacgtggtgacccgctgcggcatcgagccgttgtgcggggcgatcctggaacgggccgcggcgaaaatcgaaaccctgtgagaaatgttcgacgttgaaaaaatacgggaggagttcccgatcctgcaccgcgaagtctacggcaagccgctggtttacctcgacagcggggctacggcccagaaaccccggacggtgatcgagacggtcgatcgccttcaccgggagctgaacgccaacattcaccgcggggtgcatttcctctcggaggaggcgacggtgttgtatgaagccgcccgggagcggatcgctgcgttcgtcggggcggccgaaaaggaggagatcgtcttcacggcgggcgccacggcgtcgctcaacacggtggcttacgcctggggcgacgccttcgtcggagcgggggacaacatcctcgtcagcgagatggagcaccactcgaacatcgtgccgtggcagatgctggccgaacgcaagggggccgaaatccgcgtgctgccgttcgacgaggcgggagcgctgcgcacggacctcctgccgtcgctcgtggacgaacgtacgcgcgtggtggccgtcacgcaggcgtccaacacgctcggcacgcggcccgacctgcggacggtggtcgcagcggcgcatgccgtcggagccgttgtcgttgtcgacggctgtcagggcgtggttcacggcggggtcgatgtccgggcgatggactgcgacttctacgccttctcgggccacaaactctacgggccgacgggaatcggcgtgctgtacggcaagcgcgaactgctggaacggatgccgccgttcatgggcggcggcgacatggtcgacacggtgacgttcgcgaagaccacctatgcccccgtgccgctgaaattcgaggccggaacggccaatttcgtgggcgccatcggactgggcgaggcggtgaagttcatgcagcggttcgaccctgcggagatcgaagcccacgaggagacgctgctgcgccgcgccacggagcggctggaggggatcggcggactgcggatttacggcacggcgcccggcaaatgcgccatcctctcgttcaatgtcgagggggtgcatccctacgatatggggatgattctcgacaagctgggcattgcggtccgcacgggccagcactgcgccgagccggtgatggaccactacgggacgacgggcatgtgccgggcctcgttcgcgctgtacaatacgcttgcggaggccgatgcgctggccgccggggtcgaacgggccgtgaagatgctgcgcaactgaaaattaaaaactactacctatgttcatcgtactcgaaggcttggacggagcgggcaagtcgacccagatccggatgttgcgccagttgctcgcagaacgtggcgtggagagcgaatacgttcattttccgcgtttcgatgcgccggtctacggcgaactgatcgcccgcttcctgcgcggcgaattcggcggcgtgaacgaagtcgacccctatctggtggccctgctcttcgcgggcgaccgggcggcggccggcccgcagatccgggcgtggatcgccgaaggcaaagccgtggtcctcgaccgttacgtctattcgaacgtgggtttccagtgtgcgaaactacctgccggcgagcggcgcgaccgcctcgcgcagtggattctggacctggaattcggttacaacgacctgccgcgccccgatctgtcgctgttcctcgacgtgccgttcgccttcaccgaacgaaagctcacggaggtccgcgagggagacgaccgcgactacctgcaaggcagccgggacattcacgaagacgctctcgacctgcaacggcgcgtgcgcgaggtgtacctcgccgccgcggcgaaggacgattcgctgcgtgtggtcgattgcagcgatccgtcgggggcgatgggttcgcccgaacataatttcgaaaaaatacgggccgtgctggccccgatactcgacgcgcgatgagaaagacccggactttcaaaatcgcggccaacgtctgccggctgatcctcgcctgcacgttcatcgtttcgggtttcacgaaggtgatagatccgtggggcacggcgctgaaggtcaacgagtacctttcgatctacggactcgactacctgcagcccggggcgatggtcttttcgatctggctgtgcggcgcggagctgatgatgggctgcatgctgctgttcaaggtccgtatccggctgatttcgatcttcgccgtgctgtcgatggttttcttcacgctgctgacgctgttgagcgccacgctcatccccgtcgaggactgcgggtgcttcggcgaggcgctgaaacttaccccgtgggagactttcgtcaagaacgtcgtgctgctgccgatggccttcgtggtgtggtggcgttaccggcccgacaagattttcgccttcaaaccgctggagatcgtgcttacctgcacgttcttctttctggcgatgtacctcggctattactgttacattcacctgccgctcgtggatttcctgccctataaggtcggggtcaatatccgcgaggcgatgcaggctcccgtcgtcgagccgggcgagtcggaaaccgtgctggtctaccgcaacaggcggacgggccgcgagcgcgagttctcgctggaagacaccgagtggcaggatgccgaaaagtgggagtgggtcgacacccgcaccacgagcgaagtcccggccgtgagacctcttgtgagcgaattcgccctgcgcgacgccgagggcgacgccacggaggaggtgctgacgatgccggggcgggtttacatgctctgcgtcacggctttcgaccgcctgccgcgttcgtgcgcacggcgcatggcccggcttgcggagcgcgcccgtgaggagggtgcgcacgtggtctgcctgacgcccgatccgctttacggcgtcacgtggcacgagttcggcacggtggaggtgcggtgctacaacatcgacgcctcgacgatgaaaaccatgctccgcgccgataacgggcttgtcgtgctgaacgacggaaccatcacctctaaaaagaactgtcgcgatattcgtccgtaggggcatcctgcgggacgctggtatgaaagttgacgccggaaacggtgtcaacttttttcgtatgcgaatcatccccattttagtgatcgccctgcttgccggggcgtgttcccgcaagacgcccgcacctgcggtggtacgccccgtgaaggtggcgacggctgccggcgcggggcttatcgacaaggatttcgccggcatggctactcccgacgacgctgtgaacctcgccttcaaggtggcggggcaggtcctcgacgtacccgtttcgcagggcgcgggcgtgaagaagggggagctgctcgccgaactcgacccccgggacatcgagttgcaggtcgcggcgacccgctcggccttcgaggagacccgctcgcagcagcagcgcatgcagcggctgctggagcacgaggcggtgtcgcggcaggaggccgaagcggccgcgacgcgctatgcgcaggcccgctcgacctacgagaacaccctcgacctgctgaaggacacccgcctgaaggccccgttcgccggggtcgtcgagcgcaagtacgtcgataatttcgaacgcgtgcaggccggacagccgattctccggctggtcaatcccgtcacctcgaccgtccagttcacgctgcccgaaaacgcgctgccgctgttgcgggacagctccacgcgctttaccgtcgcgttcgacaactaccggggcgcggccattccggcccgcctgaaagagtatgtcgaaacctcgtccgacgcctcgggattccccgtgtcgctgactctcgaaaaccccgatccggcccgttaccgcatctcgcccggcatgtcgtgcacgatcaccatgttgagcgccgatcccgttcccgatgccgtgtcgctgcccgtttcggccgtctgcgccccggccgggggcgggacctacgtctggatcgtcggcgcgggcgaccgcgtcatgcgccgcgaggtgacgctcggggagctgttcggccgcgaccgggtggtcgtcgacagcggtgtcgcgcccggcgaacgggtcgtcacggcgggcgtttaccagctgcgcgagggcgaacgggtccggatcttaaactgacgccgccatgaacctgcccgaatattcgctgcgcagcgccaaggtgatctggttcttcctcgccgtgctgctggcgggaggcgccctggggttcgccacgctgggcaagaaggaggatgcggtcttcgtcatcaagtcggcgtcgctcgtctgctcctatccgggggccacgccgcagcaggtcgaggagcttgtcactgaacccatcgaacgcgaggtgcagtcgatgcgccgcgtgcataaaatcacttcggaatcctattacgggctttcgaagatacaggtcgaactggacccggccacacccgccgccgaaattccgcaactgtgggacgaactgcgccgcaaggtgctcaacgtccagccgcgcctgcccgcgggggcttcggcggtgaccgtcgccgacgatttcggcgacgtgtacggcatctactacgggctttcggtcgacggaggcttcacctggtccgaactgcgcgactgggcgcagcggctcaaaacggcgctcgtgacggtcgacggcgtgcagaaggtggccctttacggcgaacagacgcccgtggtgaacgtctatgtcagcatggcgacgctggccaatttcgccatccgtcccgaaaccatcgtcgcgaccatcggccagcagaattccatcgtcgacagcggcgagaagcaggccggaaaactccagatacagattctcgaggacggaacctacaagacgctcgacgacctttcggaccagctgctgatctcctcttcgggcaaacagtaccgcctgggcgacatcgcccgcgtcgagcggggctacgccgagccgccgcagacgatgatgcgcgtcgacggccgccgcgccgtgggcatcggcgtctcgaccgaggagggcgtcgacgtggtgaagaccggtgcggagatcgaatccctgctggcttcgctcacgcggcagatgccgctgggcatggagctgacggtgctctatcccgagaaccgcatcgcccgggaggccaattccacgttcattctcaacctcgccgagtcggttgcgatcgtcattctgatcatcatgctcgtcatgggcttccgcgccggggtgctgatcggcagttcgctgctcttctcgatcggcggcacgctgctcctgatgcagtttctgggcgaggggctcaaccgcacctcgctggccggtttcatcatcgcgatgggcatgctcgtcgacaacgccatcgtcgtcaccgacaatgcacaacaggccatgctgcggggcgcggcacgccgcacggccgttgtcgagggagccaacgccccgcggtggagcctgctgggggccacgctgatcgccatattctcgtttctgccgctgtacctcgccccctcgtcggtggccgagatcgtcaagccgctgttcgtcgtgctggctctctcgctgctgttgagctgggtgctggccctgacgcagacgccgctgttcggcaatttcatgctcaaggtgaaacctgtcgccggcgatccctacgacacgcgcttctaccgcgccttcgaccgcctgctggccgccctgctgcggtggcggtgggccgtcgcggcgacggtcgcggggctgttcgtcctgtcgctggccgtcatggggctgatgccccagaacttctttccgtcgctcgacaaaccctatttccgggccgacgtgctgctgcccgacgggtataatatccgcgatacggagcgtaatctgctcgccatggaggagtggctgcgcgcgcagcccgaggtgaagaccgtctcgatgacgctcgggtcgacgccgccgcgttactatctggccagcagtagcatttcgttgcgtcccaatttcggcaacatcctcgtcgaactgcacgacaagcggcagaccgaggccgtcgaggagcgtttcaacgcctatgtcaccgcgaattttcccgacgtgtggctgcgctcgtcgctcttcaagctctcgcccgtgcctgacgcggccatcgaattcggcttcatcggcgacgacgtcgacacgctgcgccgtctcgcggcccgggccgaagaggtgatgtggcgcacccccggagccgtaaacatccgcaacggctggggcaaccgcgtgccgatgtggcagccggtctactcgcagatgaagggccagcgcatcggtatcacccgcagccagatggcccgcggcatcaccatcgccacgcagggatacacgctgggcgaataccgcgagggcgaccagttcatgccgatccttctgaaagacgagaacatcggttcgtataacctgaccaatttgcaggccctgccgatcttcaatccttcgggcaaggtcttttcgattgagcaggcgaccgacggattccgtttcgatttccggccgggcgtcatcaagcgtttcaaccgccagcgggtgatgaaggcccaatgcgacccgggccgcggggtcaacaccatgcagttgttcgccgcgctgcgcgattcggtggaccgcgccgtggtgcttcccgagggctactcgatgaaggtcttcggcgagcaggagagccagcaggagtccaacgaggcgctggccgaatacatgccgctgacgctggtgctcatcctcatcgtcctgctgctgctgctgcgcaactaccgcgagccggtcgtcattctactgatgatccccctgatcttcatcggcgtggtgctgggactggccgtcacgggcaaggtgttcaactttttctccctgctggggttgctgggactcgtcggcatgaacatcaagaacgccgtggtgctcgtcgagcagatcggcgtgctgcgggccgcgggcaaagacccctacgaggccctgacctctgcgacgcgcagccgtatcgtcccggtggcgatggcctcgggaacgaccattctgggcatgctgccgctgttgttcgactcgatgttcggcgcgatggccgccacgatcatgggcggactgctggtcgccacgctgctgacggtctgcgtcctgccggtggtctacgcgctgttctacaatatccgcaagccatgaagataacagtttcgataatcgccctttggctctgcgtcccggcgctggggcagacctcgctcgccgactaccgcgctgccgtcgccgattacagctggcagctgaagatcgccgcctcgaagagcgatgcggcggccgagacggcggggcaggcccgtacgggctacttgccgcggctcgcgatggacggcagtttcacggcgaccgtgcgccatttcgacggcgtggaacgctggacgttcagcctcctgccgcagctggtgcagaccgtctacggcggcggtgcggtgcgggccgcggcccggcaggccgaactgggctacggcatcgcgctgtgcgacgaggagttttcgcgcctcgacgtgcgctatgccgccgactacgcctactggaacctctcggccgtggaactctatgccgcctcgatgcggcagtatgtcgcgatcatccgttcgctcaaggaggtcgtcgaccgccgcttttcggagggctatatcgccaagggcgacgtgctgatgatcgacgcacggttgagcgaggccgaatactcgctcgtgagcgccgagcagagttacgaggtcgcgctccataacttcaacatcctccgcggaaccgacgccgcgctcggcgtacagctcgcgcagggcatccgcgactcgctgccgatgcccggacgggtcgtggcggccgaggcgctggagcggcgtcccgactatgccgccgcacggctgcgctcggagcaggccgaggcgggaatccgggccgtccgcgcgccgttcaatccgcagttgagcgtgggtgtcggcggcatgtggcagccctattaccccaacagcacgggggcgacctacgtcgacggatcggctttcgtgaaactctccgtgccgatcttccactggggcgaacgccgccgggccgtgggggccgcgcgcgccgtgcagttgcagcaggagtggaacgccgcgctcgtgcacgacgacatcgtgcgcgaggagatgaacggctggacggccctcgtgcagagccgcgcgcaggtcgacgcctcggaagagagcctccgcatcgcgggcgagaacctctccatcagcacctattcctacggcgaaggcctggcgacgatcctcgacgtcctgcaagcccagttgagctggattcagctctattcgaacgccatccgggcgcattacaactatgccgtggcggtgtcggactaccagcgcatcacggcgcaatagaaaaacggcggagaatctctccgccgttttttcctgccgccgggcgttctacgccttcgccggctgggtgctgaccaccgcgatttcgcgcgacacgggtgcgatcctgcgcagcatctgcaccatgccgcagtacttttcgtgtgtcagttccagtgcgcggccgaccttcgcctggtcgtcttcggagctgcattcgacgttgtaaaccacatggaacgagcggtatacgctttcggattgaaccgtctcggcggataaatcgcccgaatagctgatttcgaagcgtttgggcgtgatgcgctctttctgcatgatcatcagcgccgtctgggcggagcattgcgccgcggcgtagagcatcagggtcttgggattcatcgcgtcgcatccggtgccgttttcggtccggaatttcccgtttccggacatctgtaaagttactttttcaatcatggatttcggtttttgtgttcaacaatgacccgggggcaaattccgttcctttggtagtgtgcggatgggcaaaaattcgtatatttgcccgtatttagtgaaacaatgcatatgcgaaaattccggatttcattgctgacccttgcccttgcggcgtgcgccttcggcgcgcaggctgccgggcctgaaatagagaccctcgcggggcgcgcccgcgacctgttcgattacggccgctggagcgacgcccggcaggaattcctgcgcgtcagggcggtgctgacgccttcggaccgcctgctggcccaggaggcggatttttacctggccgcctgcgccgtggagctgggcagccccgatgccgaaggggccttgcgcgaattcgcggagcgttatcccgaatcggtctacgccaacgacgtgcgtttcgcactcggttcgttctactgcgccgcggggaacatggaaaaggcccgcgaggctttcgcgcagaccgattacaaggcgttgagcgcgccgcgccgcgagcagtacgacatccgcatgggctacgtcgcgttcgccgggggcgactaccggaaggcgtacgactatttcgaccgcatcggcagccgcagcgaatacgtcgatcacgcccgttactacaaggcctatatcgactacgccgaagggcgttacggccgtgcgaagcaggccttcacggcgcttctgcgcagcgacgcctaccgcgacgtggttccctactacctcatgcagatcgagttccgcgagggcaactaccgctatgtggtcgaaaacggcgagacgctggcccgccgggccgttcccgagcggcgcgccgagctggagcgcgtggtcgccgaatcgtggttccggctggaggatttcaacaggacgctggagcacctcgcggctttccggaaggccggcggggagatggaccgcgacgccagctacctggagggcttctcgctctaccgcacggcccgctatgcggaggccgcggagtggctgcgcaaggcgtgcggcgccgaagacgcgctgacgcagaacgcctcctaccacctggccgactgttacctgcgcgccggggacaaggagtcggcgatgcaggctttcgcgatggcttccgacgagtcgctcgacgcgacggtggccgaggacgcgctgttcaactacgccaaattgcagtacgaactgggcggcggcgccttcaacggcgcgatcaacgtgctgacgcgctatgtcgaacgctatccttcgtcgccgcgcgcggaggaggcccgtgcgctgctgatcgccgcttactacaactcccgcgactacgatgccgcgtacagggccatcaaacagatgccctcgggcgacgccgacatccgcgcggcgttgcagaagatcacctatttccgcgctctggaggcctacaaggcgggcgacatgcgtgcggcgcagcgttacctcacggaatccgccgcggtgaacgtcagccccaagtacaccgcgctgaatgccttctggcagggtgaaatcgccttcgcacagggcgactacccggtggcggcggccaaatacaacgcctacctgaagcgtgcgccccgcaccgagcgggagtatgcgctggcgtggtacaatctcggttactgcgccttcgaccgcaacgacctggggcaggcgcaggcttcgttccgaaagttcctcgccgcctggtcgccgcgcgaccgttaccgcgccgacgcctacaaccggttgggcgacgcggcctattccgaccgccgtttcgaggaggccgtgggggagtatgacaaagccatcgccctggcgacgcccgaacagcagtacgcccgctacaaacgggccgtgacgctcggcatcctgggccgcacggaccagaagcagcaggccctgcggcagatcgccgcttcgggcggcgactatgccgacgaagcctcctacgagctgggacgcagctacatcgcgcaggagaagtatgccgagggcgccgcgcagctcgaaaagttcgtggccgcctatccgtcgtcgccgcgctgcacgcaggcgctgtccgacctcgggctggcctacctgaatctgggcgacaagcaaaagtcgctcaagtattacgatcgggtgatcggggcgtcgccccactcctcggaagccaggggcgcgatgcagtcgatccgcgagatctacgtttcgcagggcgacgccgacgcctatttcgactacgccgccaaggccggactggagagcgacctgacggccctttcgcgcgactcgctgtcgttcgccgcggcacagaaactctacctcgacggacagcaggaggctgccgcgaagtcgctgcgcagctatgtgcagagctatccgaaggggtattacctgaccgacgcgctctactatttgagcgactgctacctccgctcgggcgagcgcggggaggccatcgagacgctcacggcgctcgccgaccgggggacgacccagtacacggtcgccgtgctggagaagctctccgagatgacttatgccgacgaacgctgggacgaggccgcctcggcctaccgccggctttacgacgccgcgccgaccaaaacgggccgcgaggaggccatgaagggctatgtgcgtgcgacggtggccgggggcgacggggcgaagatcgccgcgatggccgccgacgtctgcgggcacgacgatgcgggggccgcggcgctccgcgaagcgaagtacgcctgggccgggcagctgcgcgccgaaggccgccgcgacgaggccgtgaagctctaccgcgaactggcgaaggacgtgcgcacgaaagagggttccgaggctgcctattacgtgatcgaatccacgttcgggagcggcgacatggacaagaccgaaaaggaggtctttgccttctccgaacgggagccgcaggcctactggctggccaaggcctttatcctgctgggcgacgtgtatgtgaagaaaggggataatttccaggcccgggcaacgtggcagagtgtcgccgacggttattcgcctgccgacgacggcatcgtggacgaagcgaaggcgcgaatcgcaaaactcaactgacgatgaagaagatgctgatagtggccgccttcgcggcggtgctgccgcagttggctgcggcgcaggtcgaaaagcaggtcgaagtgaccaaggcctatgtcccgaaggtggagagcgcctcgaaactggccgtccagcccgacatgaccgacacggcgcgcatgcgccccgaaatcgactacaccattacgccgctgtcgttgcgcacgacgctctcgccgcgtccgatccgccccgcgacggtgacctactgggagttcaaccgaccgctgcccttctacctgaaggccggggcggggtatccgctcaactcggtgctggacttctacgcctcgtcgcagaatccgtcgacgggctacgtcgtggggtacgtcaaccacgaggggcggtacgccgatattaaaaacgatttcggggtgaagaacaattcgacgcggatgttcaaccgcatcggggccgccgcgggcaagtatttcggccggcacatcctcgaaggcgacatttactacgacaaccggatgtatcaccgttacggggcctgggccgacggagacggcgcgggtctcgggatcggggggatgaacgactacggcgatgcgaacgtcgcggtgcgtttcggagacaattttcaggacctgagccgcacgaactttgaaatagccctgcgcggggggatgttcttcgaccactccgagtggccggattacggcgacaaggcccggcagaccgcactcggggccagggcgaagatcgcccggggattcggccgcagcaggttctcgctcgaagcgggatacgaattgcggtccgggcagaaatcgctggagggcagcagccagcagctgatccacgccgccctgcgctacggtttcgccggcggggtcgtgcgcttcgacgtgggggccgactactaccgcgaccggaccgagttcgaaggagaaccctcgaacctcgtgaagagtgaaaattatgtcattcctttcgcccggctcgatttcaatctcggaacgccggggctgaaacccttcttcgaggccgacggcgcggtgacgccgaacgacttccgggcgctgacgctggaaaatccctatgtcgcctcctcgacgtggctcgacaaaagttccgtggactacaatttccgtctcggactgggcggcagtctctggcgcagccgcttcgactaccgtgtctacgccggggtgtcggtccgcgacaaccatcttttctggaccacgtaccggagtttgtcggacgatcctgctttttcggaggtttttcagggcgttctggtccctgtgatggcgcggcagaccgtcacttcgttcaacggcgagatcgagtttcggcccgtgagtgcgctgaaattcgacctggacgtgcacggctatctctataacgacgagacggatctgaaaaacggcgctccgtcgttcgccgggaacgtgggcgtcgcctacgagggccgcaaggtctcgttcggggtgaaggcgctgatgcagggcgtgcgccgctggacggtgatcgacctttcggctacgaccgacgcttcggaaccggtctgtggtccgtctttcgaagcgcccttcggcgtggacctgcgggtgaatttcgactggaaggtttcgggccgcgtgacgctcttcgccgagggccgcaacctcgtcaaccgccgcctgtacgaatacccctggtatcccgaactgggagccaatttcacggtgggcgtcaaggccaatttctgaaaccgtttccgccgggagcggttttccggaacgggggctttttcgaaaagcccccgtttttttgcccctcgcgaaagacgacaattcgtttaattgatgatcattttcggctgtcgggaagaaccgaccggaaatttcgctatattggagcgaatttaattcacacgactatgaaacatacaatgcccgagcttccctatgcaccggaagcgcttgctccgaagatgagcaaagagaccttcgattaccactatggaaagcatttgcagacttatgtgaacaacctgaacaacctgatcgcggggacgccttacgaggagatgccgctcgacgagatcgttcgcaaggccgatgggggcattttcaacaatgccgcccaggcctggaaccataccttctttttccggatgctgactcccgcgcagcagccgatgcccgcgaaactggccgccaaactcaccgaggcgttcggttcggtggaggctttcaaggagcagttcaccaaggccgccgtggggctgttcggctccggatgggcgtggctggcgatggacaaggccgggaagctgtcgatcgtcgccaagccgaacgccggcaacccgatgaccgacggactgcgtccggtgatgaccgtggacgtttgggagcacgcctattacatcgactaccgcaaccgtcgtcccgattttctggcggcgttctgggagctgatcgactggcaaaaggtcgccgaccgctgcatcccgaagcggtacaagtgcacggcctgcgactacgtctacgacccggcgaagggcgatcccgagacgggcatcgagccggggacgccgttcgaggagattcccgacgactggacctgcccgatctgcggactctacaagactgacttcgaggctgtcgaggagtaaacgaaaaacctccgcgtgcaaacgcggaggtttttttgtgcccgggtcgcgggaacggatcagaagacgaacttttcgattttcagttcgcccagctgttccagacgcggcacgagggtcgtgaagtgcgacgcctgttcgtgggccgcgagggcctttgcattgctccaggtttcgcagatcatcagcacgtcgctgcgcgtggcgctttcgaacaggtcgtaggccacgcatccctcgtccttgagcgaagcggctgccagctccttggctgtgcgcaccagttcttcgcggttgctttccgtcgtgcggataaatacattgagacgtatcattggtttccagttttttggttttgtcgttttgcaaatataacgaatttttcggtgacggtgcgccgtcggcggaaacaaattgtcgacttccccggaaatcccgccggaagtcccgcttctgcggcgtcggggaggagtccgcgagggaaccgtccggcggctgcggggtgcgagttgccggaattttttgtatcttgtgcctttaaccgcattaattatggaactgaacgacaagaaattcgcggtgctggtcgatgccgacaacatctcgcaccgcaagataaaggatattctggatgagatcgccaactacggcacaccgacgataaaacgcatttacggggatttcaccaatccgaaattcgccgcctggaaagaggtgctgctggagaactccatcacgcccattcagcagtacgcctatacgacgggcaagaacgcgaccgattcggcgctgatcatcgacgcgatggacattctgcacaaggagggcgtggacggattctgcatcgtgtcgagcgacagcgactacacgcgcctggccagccgtatccgcgaatcgggccgggaggtgctggggttcggcgagaagaagacgccgaagccgttcatcaagtcctgcgacaaattcatctacgtcgaaatcctcgggcagacgccgccggagaaggcggcccctgcgaagaaaaaggcggacgcgaaaagatccgccggggccgaagcgcctgtgggtccggccgccgaaactgccggggaaaagaaaccgtcgccggatgcggggcacgcctcgacgatcatccgtccgttcgacgacgaattccgcacgctgctggagaacacgatcgacgatgccgccgacgacagcggctgggcctctctgggcgacgtgggcagcgtgctgtcgaagaagatgccggatttcgacccccgcaactacggctacaagaaactttcgctcctggtccgggcgctttccgatgccgtcgacatgaagacggagcagcaacgggtctacgtccgcaaccgggtggggtagggctttccgtatttcgggagggatcagagcgggccgaggctcccgcgggcggcttcgtattcggcgacgagacggcggaggatctcgccggccggcggcaggtcttcgatgagcgcggcgatctgtccgatctccagttccccttcgtcgaggtcgccttcgaaaatcccccgtttcgggcgtccgcggccgatcagggccgacaattcttcggcgtcggcgccgcgcgattcggcctcctcgaccgtgcggcagaaaccgttgcggacgaggcgcgtcgggatcacctttttgagcgtcaggatcgtgccgccctcctgtacctctacgcaccgccgtttgaacgcctcgcaggccgaactctcccgcgacagcgcaaagcgcgtccctaactggcatccttcggcgcccagggcgaaagcggccagcatgccggcccccgtggcgatgcctcccgcggcgatgagcggcaggtcgacggcctgccgcacctgcgggacgagggccatcgtcgtcgtctcctcacggccgttgtgacccccggcctcgaatccctcggccaccacggcgtccacacccgcttcgcggctcttgagcgcgaatttcgaactcgacaccacgtgcgccacgcggcagcctgcgtcgtgcaggcgtgcggtccaggtcgcggggttgcccgccgaggtgaagacggccgggacgcgctcttccgtgatgacgtccatcagttggggcgcataacggtaggccagcggcacgttgacgccgaacggccgggaggaggccgcacggcatttgcggatgtgctcgcgcagcagttcgggggtcatcgagccggagccgatcagccccagcccgccggcctcgctgacggcggcggccagccgccagccgctgcaccagaccatcccgcctgcgacgacggggtagcggatgccgaaaagggtcgtgattctgttttccatcgttttctggttttctgcgggattaagatacaattatttttccaaaacgggagcggatgttccggaaggtatgcgcaaaaaaaagcggcgcttcgacccgtcgggtcaaaacgccgttatgaaaaaaaagggtgagctacttacatcgcaccgctacgaccacatacccttgctcgattcctcgcctgggggattctgtaggagctggtcgtgtaagactcacccgggcacaaaagtaggaaaattttatatctttgcaaaaaaaaactgaaatgcgtaagaaaatattaggttggggtctgctggcggcgttcgtcctgacggccggcgcagggcttgtcctgcggcagcagttctatggaaatgcggtcgttacggagcgggacctctacgtgagcgcccgggccgaatacgggcaggtcgcggactcgctgctgccgcagatcaaacaccgccgggctttcgacgcctatgcccggaggatcaacctgtccgaaaccttcaagcccgggcattacgtgctcaaacacggcatgagcgtcatcgaaatcgcgcgcatgctcaagctggggttgcagacccccgtgcgggtgacgatcaacaacgtgcgcatcccggcccagctggcgcagaaactcgcacggcagatcgacgccgattccacggcgatcatgcaggcgctgacctcggaggagctggccgcggaggtcggattcgacagcgtgacgctcttttcgatgttcattcccgacagctacgagttctactggacggtgacgcccggggagttcgtcaggcgcatgaagcgcgagtacgaccgtttctggacttccgaacgcgatgtaaaacgcaagcgcagcggattgagccggctggaggtgatgacgctggcttcgatcgtctacgaggagacccgcaagagcgacgagatgccccgcgtggccggggtctacgtcaaccgcctgaagaagggcatcaagttgcaggccgacccgacggtgaagtacgccatgcaggatttcggcctgcgccgcatcctctaccgccatctgaaatacgattctccctataatacgtatgtgaacgaggggctgccgccctcgccgatctgcatgcccggaaagaacgccatcgacgccgtgctgaactacgaaaagcacgactatatcttcttctgcgcacggcccgaattcgacggttaccacaacttcgccaaaacccttcgcgagcacaataagaacgcccgggcgtacagcgacgaactcaatcggcgtaagattaaataattttcgtatctttgtcatcccatgcttgcgaagatatacgaacagaacccctcggagaaggagttgcagcgcgtcgtagacgccctggagcgggatgaaatcatcatttatcccaccgacagcgtctatgccttcggctgttcgctgcgctcgccgaaggccatcgagcggctgcgccgcatccggggcaagagcgaggagaagttcaccgtggtcttcgaaaacatcgcccaggtcgcggagtactgccgggtggacaatgccgttttccggattctgaagcgcaatctgcccgggccgttcaccttcgtgctggcggcttcggcgcgcattccggacaaggcgctcgaacggcgccgcacgatcggcgtccgcattccggccagccccgtcgcgcgggccgtggtcggggcgctggggtgtccgatgatcaccacgtcggtcaaggacgacgaccaggtggtggagtatacgaccgatcccgagctgatccacgagcgttacggccgcgaggtcgcgctggtcatcgacggaggcatcggcgacaacgtccccacgacggtcgtggacctgacgggcgacgggccggagatactgcgcgaaggcaagggtgaactgcaatgaagagggggctgatgccgccgcgcggcaaggctggcgcctcggagtgttaaaaacaaaatagaaaaatggagaagaagaatttctggaacgaagccgcgaaatacggcgtgatcatggctctggtcgcgatccttttcgacgtgctgggcttttacgtgcagaacacgctgctgtccctgctgtcgctcgtcattttcgtcctgctgctggggtatttcaccaaacgccgcgcggaacgcttcggagccaggggatacggctacgggcagtgtctgggtttcatggtcagcgtgatgctctgcgccgggtttatcgagggagccttcatgggcgtcgcctccaactggctctttgcggccagatacgaggcgatgatcggtccgtcgatcgccatgctggagaacaccgggttctacacgggcgaccagatcgagatgatgatgaaactgatgcgttcgccgctggtgcagctcttcagcggaatgctcgcctcggctatcaagggcggctttttcggtctgtttattgctgccttcaccaagcgtgatcccgacgttttctcggaaggcactaaccaataaggatggataaactgaatatatcggtcgtcgtgccgctctacaacgaggcggagtccctgcccgaactggcggcatggattgaccgcgtgatgcgcgaaaacgggttttcgtacgagcttattctgatcgacgacggttcgtcggacggctcgtgggaggaggtcgaacggctcaagacgcagtatccggccatccggggcatcggtttcgcgcgcaactacggcaagtccgcggccctctactgcggattcgcggctgcggaaggcgaggtcgtcattacgatggacgccgacttgcaggattcgcccgacgaaatccccgagctgcgccgcatgatcctcgaagagggctacgacctggtctcggggtggaaaaagaaacgccacgacccgatcggcaaacgctggcccagcaaattcttcaactggacggcccgggccgcgtcgggcatccggctccatgatttcaactgcgggctgaaagcctaccgccgcaaggtggtgaaggccatcgaggtctacggcgagatgcaccgcttcattccgttcctggccaagcaggccgggttcggccgcatcggcgagaaggtcgtcgaccatcgcgcccgcaagtacggcagttcgaaattcggcctcgaacgcacggtgaaagggtatctggacctgatcacggtgctgtttatgacgcatttcgggcgttcgccgatgtacttcttcggcagcctcggaacgctgatgttcctcatgggcggcggcacgacggtgtggatcatcgccgagaagctctggaagcagagccacgccctgcccctgcgggcggttacggaccagccgctgttttatctggcgattttggccgtaattctcggcgttcagctgtttttggccggatttttgggcgagctgatcaacagagggtcttccgagcggaacaaatacctgatcgacaaaactttgtaaatgatgatacaacgaatccaaacgctttatttgctgatcattgcggcgcttatggccgtgacgctcttttcggggctggcgtggtttgcgggtgacgccggcgagttcgggctttacgccttcgggttgaaaaccgccgaaggggagcttgtccagtccaccgtctatatgggcgtcctgctggcgctggcctgcgcgctgccgctggtgacgattttcctgttccgtcgccgtttgctgcaaatacgcctctgtgtggtggaaatggtgttgctgttaggctcgctggtgatggaaggcgtctattactttttgagctggcgggtcttctccgacctgacgttccatacgcagggcttcaagcccgccattgtgctgcctctggtctgcctgctgtttgcctatttggcggcccgtgcgattttccgcgacgaactgctggtgcgcgcagccgacagaatacgctgatcgagcggatactgctgacccggagtatgcccgagcgcatgttccgggtcttctgtccccgtcggcgaactgctgttcggacggaaaagggttgcaattcggaccgatctgattattaaaagaatgttacaaacctttgcaggtccggaaaataattttaactttgaggcataatatattgtcattatgtagtgaatttaaagaattttggctacaaacaatacattttttaactaacactcaactctatgaaagtagtaaatttttggaagacattgttctgtgcagcgctggccgtgacggcttttagcgcatgttcggacgatgacgaagagggcggttattcgggcatgcccgaaattaccgtgaacggcggcgagtcggtgactgtcgccgggaaactcgagggcggcaagctcgaacagacggtcgaggtcgtttcgaaaggcgactggaccctgacattcaagaaccccggggattcgcagtgggttactcccagcgcgatgtcgggcaagaccggtacgacgcagcttaccttcacgctgggtcaggcttcgggagagcgcagcgcaatccttgttctgaccgccagctccaaggtcgagggcttcccgcttacggacgaggctacgatcacggtcgtacagagcgacagcgatgttccgacgggtaacgctctttacagcgagaactgcggcacgaaggtcgataaagtcgatggctactggccttatgtggacaagttcgaaggttggacccgcggcggttcgctcgatcagaaggccgttacttataccggcaacagcgcttcggtagccaacagcggcaaggttttcgatcctgccgaggatgaaacgacggtagttacgggtcctccctatgtttcgatgaacaaatcgacttcggttttcaacatcaatgacatcaatatcgcatcgaacaccaatttcaccttcacgtttactgccgctcaacagattaactattccaatggcgtagtgctgggcgacatgacggatgaaacgattcggttctcggtgtctaccgatggttcgagctatgctcccgttgctctgaaagtcaaaaaagtcgcttccggctactggtatctctgcaccgccgaattcaaactgcctgccggtgtttcgaccgataagatctgggttcgtttcgacggctatgcaggacttgaaaaccacggtctgcgtatcgacgacttcaaactttatgaaggcggcaacggttcggaactcgtcgttccttcggtggattatacgaagggtacggttgccgaggctatcgcagccggagccggcaagaactacgaggtcgccgctacggtcgtagccatgcacacgcagggtatcctgatcggcgatgcgtcgggtgtcatgctggcgttccttggcgaggctcctgcggtagctgttaacgatgccgttaccgttaagggaacgaccgaattgcggaatggcgtcattcagttcggcaaggagggtctttcggtcgccaagaccggcacgggcagctataacacgcctgctcccgaggtgatggacggcacggctgtcacggcctatatcgcaacggccttggaaaataaggctgtgtacaagtatgtgaaatacaacggtgagtttactgtcagcggcaactattacaatgtcgttatcgccggtacgaccacgaaaggctctgttgcctatggcaaatcggagtgggcgtcgtttaatgacaaaccggtgactgtcgaaggctggctgctcggcggtacggccaactatctccagacgatggctacgtcggtgacggtcgattcttcgacgccgattgttgaaatctccgctccccagcagttcgctgcaacctctcccgtggctcaaacgctcaactatacggttaccaacacgacggcttcggctgtaacgttcgcaatcgagggtacgaatgccgacaagttctcgctcggcgccaagactgataacaccatcgtcgtaagcgcgaaaggcgacaacacggataagacagcctatacggccaatctggttgccaaagttgccggtgcgacggttgcaacggttgctctgaagcaggctgcgcctacgagcggttctggctatgcgaagattgaaaagattgccgatctgaaagaaggaacgggctatctggcaggccttgttaatggtaaatatcagacttggacaggagtacttaccaataagcagtgtgagacagttccttattcatataccgaggcaacgggtgcatttgttgctgatgatgccgcaggtgcagagatttcacttgtagctgtaagcggtgtttctaatgcttattatattaagtatggtgaaaaatatctgacagttggtgctgccggtaagaatcaacttgtattggctgattctgcgggcgataactattggacgtttactgatgacactgatggtgttaaggcaaccgcaaaagcatttgcatctattatgatgacatcgactggagctgcgtcgaaatatattcggtcgtatgtgacgacgaatacgtctggtgttgccggtgttgtattcttcctggcaaaataacaacagtcgaggaaaccgacttgtaaaaccaaccactcttggcggggataacaccccgtcaagagtttggtttctaaatgggtctgcggaccaaatgttatactttattctgaatgatgttgaaaattaaacagataggcatgctgctcgtgacgatgtcggcgatgcttgtcctgtttgcgggatgcggcgacaaggacgacgggggcgacaaggagtccctcgcgacgctcgttgcagagaccgtgagcagttcaaccacaacgaacaagatttcgacccaaggcccgtcgggcatcaccttcgaggcgacgatcgtctcgcagggcggggatgcggagtggtgttcgttcgatttgaataagcaggtatcctccgccggcggaaacgtcggggacccggcctacctctatttggacaaaaacaattccgacgacgaccgcacggcgcggatcgacgtaacctataccaacggttattccacctccctgacgctgacgcagagggccgcgggctttatcgactacgaccgttcgtggggcgaacagcccgaatatcgttccgacgacgcttatatctataagacctattatgcgacgtttgtgagcaatcagttctttccgggcggaaaactgcgcaactattcggtatgctacgatgtcgaccggcatatttcgcattgggtggcttatccgatcttcaagaaggtctacgaaacgcccgttttgagacgggtcaacgatttcaattacgatcccaatgaccagctgcccgtgattcccacccgcgaccagcaatacatcgggacaggcggcaacggccgcggttacggtgcatggggttacgaccgcgggcacatgcttccgcaggcttcgcgttacaacaattacgagccgaaccggatgacttactacggcaccaacatgatgccccagaacagcacgctgaatcagaatatctgggcctcgctggagggcaaagtccgtggctggggaggcttgcagacctacgatacgctctatgtggtgacgggagccgctttcaagagcacgaagaccatcgacaatgccaacggaccgatcgccgtgccgtcgcattgctggaaagtgctgctgcgtcagcggggcaaccagaaccggcagatctctcaattcaaggcggatgaactgaaagccatcggcttcgtgttcaccaacgatgacgccggagccgccacgtcgatcgaatcggctgtccgttcggtgaaggagatcgaggagctgacgggcttcaagttcttccgcaacctcgacccggccgtggccgatgcggtgaaaagccagaagaacctcgccgactggtagggattatgatacaatgaattgaaccttaacaacaaaaatcgtttatgaagagaatctttttgacaggactgtttgcctcgctgatcgcggtggcatgcttcgcgcagaagccctacaaagtggtcttctacaacttcgagaacctgttcgacaccattcacgatcccggcgtcctcgatgaggagttcacgcccgaaggacccaagaagtggaactcggccaagtacaccaggaaaatcgggaacctcgaacgggtgttgttcgacatcgccgccgaggataaggattatcccgtggtgatcggcgtttcggagatcgagaaccgctcggtgatggaggatgtgatcgcgcagccgaaactcgcgcccggcaactaccgcatcgtgcattacgattcgcccgacgcacgcggcgtcgacgtggcgttctactaccgtcccgacgttttcaagctggagggaagcgccgccattccgttcaagatgccggaactgcccaacttcaggacgcgtgatttcgtcacgatgtggggcacgatcgacagcgagccgttcttcttcctcgtgagccactggccttcgcgtctgggcggcaaggaggcttcggcccccaagcgtctggctgccgccaagcaggtgaagcacatcgtcgactcggtgaccgccgccaacccggccacgaaggtggtcgtcatgggcgacctgaacgacgatgccacggatgacagcatcgtcgaggggttgcgcgccaagggcaagatcaaggaggtcggcaagggcgacatgttcaatcccttcatcggcctgctgaaagcgggttacggcacgctggcttaccgcgacgagtggaacctgttcgacaacatcatcgtttcggagaacctcgccaccggttccacgggcagcctgaaaatccagcccgccggcaactcgaagttctacggcggcatcttccgccgtccctacatgatccagaaggagggccagtacaagggctatccgctgcgtacgttcgtgggcaacgatttccagggcggtttcagcgaccacttccccgtatatatctacatcgccaaataaacactctaaaatatttgtatgaaactcaaagttctacttattctgatgctcgccgccgtgaccttcacgtcctatgcgcaggacggaggcatccgcggtaaggtggtttcgcgcaacggtcgcgtggtcttgagcaatgtacaggtgaagatcgaatcgctgggtctgacggccatgaccgacaaggacggcaacttcatcttcgagaatcttcctgcgggcagctacacggtgctcttctctacgcccgacttcgaggacctcaacctgatggtccgcgtaggcgataagcatgtgcaggacctcaagtcggtgatcatcgtgccgtcggggcagagtgcggttctggacgacgccgttttcgccgaattcgacagcgactcctcgtcgtcggacacgcaggcgctgccttcgtcgctctcttcgtcgaaggacctcttcaacaacatcgcatcgtaccgtttcagcgagatgcgtttcaacgtccgcggctacgattcgcagtactcggacatctacctgaacggcatccgcttcaacgacgccatgacgggctacggtccctggtcgctgtggagcggactgaacgacgcgacgcgtaaccaggagaactacacgggcctcgaagcgtcggatttcggcatcggcggcatcggcggcatgaccaacgtcaacgcccgcgcctcgcagatgcgcaagggattccgcgtgagcgtgtcgaacggcaaccagatgtaccgtttccgtgcgatggtttcctacggctcgggacagttggacaacggctggtcgtacgccttctcggtgggaacccgccagggcggcaacggctatgtggacggcgtttactacaactcctattcctatttcgcttcggccgagaagcttttcggacagaaccaccgccttgcgttgacgctgctggcttcgccttcggagcgcggcgcgcagcaggcttcgaccgacgaggcttacgctctgttcggcaacaactactacaaccccaatgtgggttaccaggccggcaagctccgcaactcgcgcgtgcgcaacacccacgagccgatcgtgatgctcaactatacgtgggacatgtcggagaacacgcgcctgaacgccgccacgtcgctgcgtttcggcaggaacggctattcggccctgacgtggaacgccggagcggacccccgcggcgactactaccgctatatgccgaattcggataagacgcagatcgtgccgggcataactaccgacgagacgatctatttttacgcgatggatggcgccatagcgaaaggtgtgtgggacggtatgctcgactacgacaaattcttccagacgaatatgcggaatatcgacaccgatccggtgctgtccaaactgatgggcaataacagtcgttcgaactacatgatcgaggagcgtcacaccgaccagctggactacaacctggcggtcaacgtgcagcataacatgcgccacaacatgcgcatcgtcggcggcgccaacctgcgcgtcaaccgcacgaattactactcggagatcaaggacctgctgggcggcgactattggtatgacatcgacaagttcgccgagcgcgacatggccagcgccgaggcttaccagaacgacctggattactactgggctacggggcacgcccgcattgcccgtgtcggcgacaagtacggttactactaccgggcgcacctgctcgaaaccaatgcctgggccaactacacgtggggcatcggcggtttctcgctgggcgtctccggatcggtcggctactcgaacatgtaccgcgagggcatgtggcgcaagggattgttccccaacgattcgaaaggcgattcgaagaaactcgactacctgacctacgatgcgaaacttgcgctgggctacaagttctctggagcgcattcgatcgaggccaatgtggcttacatgcagcaggcgcccaagttcgcgacggcattcgtgtcgccccgtacgcgcaacacgaccacgccggggctgaaggccgagaagattttcgcagccgatcttacctataacctcaacctgccctacatcaaggcgcgtctttcgggatactatacgacgatcgaggaccagtcgaaggtcatctcgttctacgacgatacccgcagttcgttcaccaacttcgccatgagcggtatcgacaaacgctactacggcgttgagttgggcctttcggttcccgtatggaacggcctctcggtcgtgggtgccttgagctggggcgactatacctatacgtcgaatcccaacttcgtgcagacggttgacaacgtggacaagatcgtactgaaagataaggtcaactgggacggttatcatgtggaaagctcgccgcaactggctttcaacatcggtctcgactaccgcggaccgcgcaactggttcgccggtgtgaacttcaactactacgacaacatctatctttcgatgaacccgatgtaccgtacggctaccgccattaagtattatacaaatgtgctgacttccaatacggccaccaatgcgcagaaggcatcggccctctcgtcgatcaagaccctccgcaagcaggagaagtttgacagcgcatatacgttgagcgccaatatcggcaagaactggtatatccaccgggtctacatgctgggcttcagcctcgaggtgaagaacatcctcaacgatcaggacatccgcacgggcggttacgagcagatgcgtatgagcaaggtccgcggcgagggcggcgagcagatttacggccgcttcccctcgaagtatttctacctgttcggtacgacctattacctgaatgtctatttccgtttctaatcgcgcaaagcataatttatgaaaagtcttaaaatagcattggcggctctcgtcggtctggtggccgtgagctgctacaacgatttcgacactccggctccgcagaagctctatacggccgacgatatggccgcaatggggcttactcggatcaccattgccgaagtgaaggaaaaatttggtccgatctccaatacgggaaccaacgacaatttctccacgaccaagaccctcaagttcggaacccgcacgtccgaggaggccaagttcgacggcctcatggagtggcccgaggcttcgaaatactacatcaagggcaaggtgatcagcagcgaccgtcagggcaacatctacaagtcgctctatatctacgacggcacggccggtatcgagctgaagctctacaacggcctttatctcgacttcctgctcgacctggcttcgaagccgatcaagagccagtgggtctacgtgcgtctcgacggtctctatctgggtaactaccgcatgatgctttcgatcggaggcgctccctcggacggcatcaacacggccggcaaccacaagttctacgccaactcgaacctcgacaacccgaaggtcgccgccctgaacgtcttccgcggcgaatacacgacgctcgacgactcggacatcaaggaggtcgacggttcgaactacacgtcgctcggcgaggccgatctgggccggctggtgcgtttcaacaagatcaagatccgctatgcgggtgtgaagaatcaggacggcgtgacgcctccgaacctcaaaaacggcggaaatgcgaatccctatccgagctggatcgtgaccgactggggaacgcccatcttcggcgcgtggtatcgctgggcctacaacaacagcgagcagaatatccgtctctacggttcggtgctgatgagctacaacgatgcggcggagtacacttcggacccgggcgtttacggcatccgtacgagcggttacagccagttcgccatgaagcccatcccgaaggacggcacggagggtacggtgctgggcatctacggcatctatgcgaagaagagcgatttcacgggaggttcggaggactgggcgcagtaccagatctcggtgagccgtatcgaggacctcggcttcccgcccgagtcgctgctttccgaggagtggatcagggccaatacgcccgcctcgtcgctgacgcctcccgtgaagaacggcggcgatgattacgagggtgactgatcccgcgtttgagcaataaaaaactgcgacccttttgggtcgcagtttttttgtgccgcggcggcagcgctaccgcttgttccatttgcaggaggtctggtagtagccgatcgcgcggtcgacctgcatggcgtccttccgctccatcgtttcgaggtggtggggattctcctcggtgggaaccacgcggtactgctcgaagcggcgcacgggcgacagaatcgtgaaggtgtcgccttcgaggtagccgaggtcctgataggtggcgatgaacgcgcggttgacatatgccgggtcgaagatgctgcggccgtagaaatgcgagtcgtagctcatgttgagcagcgacagcagggtgggcatcaggtcgatctgcgagacgatgccgtcgaccactccgggttcgataagcccgggggcgaggatcagcgccgggatgtggtatttctgcaacggaatctcggtgcggcctgcgctcgaagcgcagtgatcggccgtgacgaggaagatcgtgttttcgaaccacggctgcctggccgcttcggcgaagaaccgtcccagcgaatagtcgctgtaaagcacgcctccggcgcggctcttcgagtcgttgggaatgcggattcgtccggcggggtaggtgaaggggcggtggttgctgacggtcatcacgtgggcgaagaacggcttgccgctgcgggtctcctcgttgagcgtgcggatgaccttccggtaggcgtcttcgtcgcagacgccccagatgttggcgaaggtgatctcttcgggcttgtagcttttctggtcgacgatgtcgtatccgttgcccgagaagaaggtctccatgttgtcgaaatagctgttgccgccgtagaaataggtcacgttgtaacccttgtcgcgcagcaaggctcctgtggagtgcattccggcgttgttcggacgcttgatgatgctctggcccgggcagggcggcagcgagagcgtcacggcctccaggccgcgcaccgtgcggttgcccgtggcgtatacgcggtcgaacgccagtcccagtttgtagagcgagtcgagtgcgggcgtgatccgttccgtgttgccgaaccgctccatgtacgaggcgctcatgctctccatggtgatcagcacgatgttgcggcggatctcctccccttcggcgcgcacggcgtgcaggttgtcgcccgtgctttggtagaccccgtgcacgaaggcttcggcctcggcttcgggacgcgtgaggtagaactgttcgtagtcgagcgtgttcttgacgaaggcgtcgtagaacttgtagagtccgttggcctgcaattcgttgacgtagacgttgtcgctgtcctggaagcgggtgttgaagttcagcagcccgatcgcggcgaacagcgccgcgacgtaggccggtccgattacggctttccacctccagcctttcaggcattcggtctgcacgagttcgctgcggaagaagtaccacgtcacgagcagcgtcacgacgacgatgcccagcgtcatcggaatgacggggtaggactccatgatgttgcccaccacctcgttggtgtagaccaggtaatcgacggcgatgaagttgtagcggacgccgaattcgctccagaagaaatattcgctgatgccgttgaagatgatggcgcccacgtagacgacgatgaagagggcgaaccacaccgtggtccagtggctgcggaatccgggcaggaagagccgcagtgcgaagctgccggcccagtagcccagcacatagagggcgattcgcggcgcgacgcttccgtattcgtcgaagatcgtgttgaagaacgccacgtagcagaacgccgccacgagcagggcgaggaggatgtagccccacggctttctgtacttggtgcgcgaaacgctcaacatgaagagccagaggaaaatgaatcccgccgtcgcggcgcagaaatcgttcacggcgcccagcaggaagacttcgcaccattcgccgaatgagaaggcgagtgaggtggtctgctcgttgaaaagcagtacgacgcgcagcacgaggccgacggcgacggtcagcagcgacagtttgagatagaggccggagaccagccgaatacttttttgcatgatgaatttgggaattaacggtacaaagttaaccattttcagcccgttcggaaaaagaaaaggcagtcaaccgggtgactgccttgttctgttgttttgaaaaatcgtttgttttggtgcttacttcgacgggcgcatgacgaccttcacgaggtttccgtccgcaaggatcttcttggcgagcgcctgcacgtcggcgttggtcaggtcgcggatcgcctgttcgtggtcggcgatgtagttcaggcccgagccgtatttgatctggatgtagttcatccatgcgccgttctgttcgaggctgttcttccagctcttgagcatgaattcgcggtgtttctcgatgtcctcgctcttgggaccgttggctgcgatctcctcgatctccttcatcacgatctcgcgcagttcgtcggccatctcctcgttggtgtcgaacgaaatggtcatgctgtaagtctcgcgggggatgtacttcgtcgaaccctggacgcgcacgccgtaggttccgcccttctcctcgcggatcgaaacgagatagcgcgaattgagcgcctgcgtcaggaacgtcagggccattttgtttttgagcgtgtagggcatctcacccgagaaatggtagttgaccgagaccttcggctgctgcatcggagccgtgaactcctccgtaacctcgcctttcaccggataggccttgtcgtcgacgtaattgatcggtttgcgggcggcggggatcgaaccgatgtatttctccacgaggggtttcagcgtttcggggtcgatgttgcccacgaacgtgaagacgaatccgttggctccggggtagagcttggcgtaaatgccgggcagctgttcgaagtcgaacttgttgacgatctccgtcgagatcatctgacggcggggattgtggccgtaggtcacgtcggccaccttctcctgcatcaggaagtcgggattcgacttggcattggcgagctgggcgaggagcatcttcgtgagattgtccacgtcgtccttgttgaaccggggctgcgtgaaattgaggtagagcagctggagcatcgtctcgatgtccttgggcgagcagacgccgcccatggcgctggtgtagttctccaccgagggctgcaccgaggccgttttgcccgaaagctgtttcttgagttccgtggccgagaatttgccgacacccgacatcgagttcacggcgggcatcatttcgcccatgtagtactcctcgtccgagagcagcgacaggccgcccttgccgactacgcccaggcgcacttcgtcggccttgaaggtcgtgggtttcacgacgaccttcgcaccgttggccagcgtccattccgtcgttccgagctgtttgtcctcgaccgtcttcttcacgggcgagcctttgagcacggtcccttctgcgatcagcggctccttgaccacgttgtcctcataggccgtgacctccgatgcggccaccttgtcgcggatggcgagaatctcctcggcggtgggcgttgcgacgccctccttctcgggagcgttgatcacgatcacctgattcgtcgggagaatggtctgcttcgcgaaggcgttgacggcatccacgttgagcatcttgatcagcatgctgtcgagctgccattcggtctcggcatcgggcatcggctggtttttctggtagttgttcagataggtctgcacgaattcgttgttgcggcggtcgttgcggttggcgtacgagcgttcggcctgacgcatcaggttctcctgggcgcgttcgaactcgccctgcgtgaatccgtagcggcgcaccttctccatttcggtatagagggtctcgaagccgcgggccagcttgccgtcctcggtcatggccacgaataccgtggcgtcgagcgtcgggatgatgccgatcacgtcgcccgtgcccatgccggcgccgaggaacggcgcgtcgggctgcatggcgatctcctgcaggcgggcgttctccatcgtggtcatgtaggcctcgatcacgttgttggcctcggccagcaccgtgttggcgagctgttcgggaagcgccgggcgcttgatgaagagctgcaccttcgtaccctgcatttcgggatcggtgtagatgctgacgatcggctcctcgttgtcgggaacctcgatggtctccttctgcgatgcgccggcggcgggagccggaatgtcggccatcagcgtcttgatcttggactcaatggcgtctacgtcgatgtcaccgaccacgattacggcctggtagtccggacggtaccattgtttgtagaaatcctccagctccttgtgccggaagttcttcagcccgtcgaggtagccgatcaggttgcggcgctcgtatttcgtgcctttgcccagcgcctgcaacagcttcatcgtcgaacgccacgacgcgccgtcgcgcgtgcgcagctcctccatgatcacgccgcgctccgagtcgatttccgacggctccagcgcgatgaagtgcgaccagtcgtgcaggatcagcagcgccgagtcgatgattccttcgcgcgaggtcggcacgtccttcatgttgtagcacgtgtaatcccagctcgtgccggcattgaggttggcgccgaatttcacgcccacggtctccagatactccgtgagctgtttgcccgggaggttcttggttccgttgaaggccatgtgttccaggaagtgggcgaggccctgctgcgaatcgttctcctggatggctcccacatcgtggaggatgtagaaatcagcctggcctttcggcttttcgttgtggcggatgtagtaggtcattccgttttccagtttcccggtgcggacctccggatcggccgggatcggctggttcatctgtgccgcggcgctgccggcggcgaacgccgcgacggccagcatcaataattttttcatgggcatttgtggtataaggtttattgtttctgtgtctcttcggggcggtattcgatgatatcacccggctggcagtccagctcgcggcagatcgcttcgagcgtggaaaaccggatggccttggccttcccgttcttgaggatcgagaggttggcgggcgtgatgtcgacccgttcggccagttcgccgagcgacatcttgcgtttggccatcattacgtctatgtttatgattatcgccataaagtcgtcccccccccttttatcgtttgcatttctctcatgtcgtctgttttagatggtcagtttctgctcctcgctcaaattctggccgatggcgaagacctcggcggcgaaaaggatcaggatacccatgatgatcattgcgtaggagacgtggaaacccgcgtcgacggtgtatccgcttccggcgagcagttcggcggcgcggctgttcatcacccagtccacggtgtcgctgatcagttcggtgacgatcgtcagcatgccgattgcgcgcagataccagacgttgcgtttgtcgagcgtgcgctcttcgcggatcgagcggcgcagcgagtggatgatcacgaacatcagtacgatgatggccagatagagaagcgggcagagcaggaccagcgcatagagccatgcgctgccgccgatcgaacggaatgccagccccagcggggatgtgcccggggcgttctgctcgacgaccagggcgagtttgcggacgttggctttgatttccacgcccggcgccgcggcgatttcgacggccgtttcgggctgtcccgtcacccggatgtcgcccagcatgtagatcatgcgcggcacgccggatttccacttttcggcgatgtcgttaccgagttccgcgccttccgccgcgccccgcgagaaattgggcaggattccgtgggcgatgcttgccacgagtacgatgaaaaacgtaatgtaaatgaccagcaggcgttgcaggagcgattttttgttctgcatgtgtgactattttggttttacagttgcaaagatagaattaattttcgaaaaacaaataatatttatcgtttttcgataaaatttttcgcggcggacaaaaaaggacggcacaggcggccgtccttcggatcgtctccggaacgtttactccacgttgtctttcagctgtttccagaatgaagcgctgatggacatcgagatcgagatggccagcacgtagaggatgaacatgacgacgaacgtgatgaagccgatgccgatcgcattgcagatggcctggaaaatgccgaatacgatgccgaacagcacgccgacgaccagcgacacgaagaacatggtccatttgctgccgtaggtggcgtcgttcgaagccttgatggcctgtatcggatttttgcccttttcgatgaggaaatagtaggagagcgtccatgcgatcgagagcacgatgcccgggatgaccatgaagagcacgccgatgaaaatcgggaaaaccatcaggcccatcgtgatgaagaactcgcccatgtagcggcggtatttgctgtcgaaaatgcccaggggattgacaatctcacccttggccaactgtgtgggcagtaaggtgatggcgattgtggtccccacattgagataaggtatccagatcgtaatgagccataaggccactgctgcgatcaccgaaggtgcgttctttacgccgatggcgacggaatccttgagggtttctccgaaatcgagttttttcacttccataactaacaggtttaagggttaacatcaaaaacaaaaatacgaaaaaaatcgtatctttgcctgcataaccgtaaaattcaatgcaatggctgaaaaatctcgctataattaccgggttgaaccgcaggacgtggatttcacgctgcgggcgacaatcccttcgctgggcggctcgatactcaacaccgcgggcatcgacgcccacggcaaggggttcggagtcgatgcgctgaatgccgacaaccattcgtgggtgctttcgcgcatggccgtcgaattcgactgccagcccacgcagtacaccgactacaccgtggctacgtggatcagcgattacggccgggtgctctcgacgcgaaacttcacgctgaccgatgccgcaggccgcgaattcggccgcgccgtgacgcagtgggcgatgatcgacctgcagagccgttcggcgatcgacctctcgtgggtgggcgacgcgcatgccgacgccatcgtcgatgccgcgcccccgacggacaagccgcgcaagatccgtgcggtaagccctaccgcgacggccgaacaccgcgtggtttacagcgacatcgacttcaaccgccacgtcaacacgatgcgctatatcgaaatgatgctcgacatgctgcccgtcgacatgctgacgcaggaggctccggtgcggctggacattcatttcctgaaagagtgccgtttcgggcagacgctgacggtggggtgcgagttgcgcgggcgttcggcgctgttcgaaatttcggccgacggcgctgcggctgccgtgcgtgcctctatcgaatggaaataggcctgcggggaacgcttcgcagggcgcttgtggaacgggttttgcagtttacggctgcaaaaccttttttcattatggagagcgcaaccaaaacacaagcgaaaaacaagtatcaggtaagcatcgacctgctgaacgatgccgtgggcaaggagatcgccacttcgttgcagtacatgtatttccacactcatttcgaggacgaccgctaccagtatctctcgaagatcatgcgcgagatttcgatcgccgagatgcgtcacatcgaggagttctccgaccgcatcctgttcctgcagggcgacgtggacatgaacgcctcgttccgcacccggcaggtcaccgacgtgaaggagatgctgcgcatggccatgcagctggagcagagtacgatcgacagctacaacgaagcctcgcgcatcgcctcggagaacaaggacgccgtaacgcacaagatgtttcaggacatcatcggcgaggaggagcagcatctcgacaccttccgcaccgagttgcagaacctgatcgactacggcgaggagtacctcgcgctgcaatcggccgccggcagcaagcatacgtcgaagagtttcaaccattccggcggcggcgaatagcggttcgcgcggcggaaagcacttctgacgcaaaaaacggaatccttttgccggggtcccgttttttcggttatctttgtacctgaatcattcgcgggaacctgtgcaaaccccggccggcgcatgagttcctcccgggggagggattcggggcggggcgggcttgccgacgcggccggaggccgcaggcgtcgggttgccggatcggatgaacggcatgaaatcgccggaatgctctgatacgatgaaaataacgattttaggacctgcccatccctaccgcggggggctggcctcgatcatggagatcatggcccgcacgttccagcggcggggcgacgaggtcgacatcaagaccttcacgctgcaatatccctcgctgctgtttcccggcgagagccagacggttgcgacgcctccgcctgcggacctccgcatctgccgctgcgtcaatacgatgaacccgctgaactgggtgcgcgtcggccgccggatacgccgcgagcgtcccgatttcgtgctgatgaagtactggacgcccttcatggccccctgtttcgggaccattgcccgcatcgcccgcggcaacggccatacgaaggtgctgtgccagatcgacaacgtcgagccgcacgaacgtcacctgaccgacaaacccttcaaccgctactacctgcattcggtggacggcttcgtctacatgtccgagcaggtgcacagcaagcttcgcgcgtacagcgacgctccggccctgttttcgccgcacccgctgttcgagaacttcggcgagcgggtcgaacgctccgaggcgtgcgtgcgtctggggctggaccctgcgaaccgctacgtgcttttcttcgggctgatccgcgattacaaggggcttgacctgctgctcgacgcctgggcgcagctccggcgcgcgggccgcaccgagggccgccggctgatcgtggcgggggagttctacaccgcccgggagccgtatctgaaccggatcgccgacaacggattgcaggacgaggtgctgctccacgaccgcttcatccccgacgacgacgtgaaatattacttttcggcggccgatttcgtcgtacagccctacaagaccgccacgcagagcggcgtgacgcagatagcctaccagttctgcgtgccgatggtcgtcacgaaagtcgggggactggccgagatcgtgcccgacggccgggtggggtatgtctgcgaacccacgcccgaaggggttgccggcgccatcgaacggatgtacgaaggggacacgcttcaacgcttccgggaaaactgcgtcgaggaacgccgccgcttttcgtgggaggagatgtgcagccgcatcacggagctgtacgggctggtggcttccggaaaatagggggcgccgcagcttccgggagaactgttttttcggcatttcgtttgttattcaggcgaaaagacctatctttgcgggacctaactcatactcttgcatattgtggcgtcacaattcatcaatctgaaatccaggttgcttaacccgtatgtggtatttgccgtctggatgctctgcacggtttggatctgcatcacgcagtcgctggccgggcctcagaactacaacaatttcctggtcttccgcggggtgttcgaccatctgttctcctcgcttcccctttacgagccctatccgctcgaatacggggatatcaaccattacggtccgattttcgcctttatcatcgcacctttcgcggtgctgccgccgtggctgggcatgtcgctgtggtgcatgagcctttcgctgctgctctactggaccgtccggcagctgccgatgcccgtggtgctgacgagcctggtgctgtggctgacgctcaacgacttttacggagcctgcttcaaacagcagttcaacatcgccgtcgcggcgctggtcgtcggggcgctggccatgatcgagaaacgccgcgaaggatgggccgcactgttcatcgtcatcggtacgttcgtcaagatttacggcatcgtcgggctggcctttttcttcttcgtgcggcgcaaaggacgtttcatcgggtatatggctttgtggagcgccatggccctgctgctgcccctgctcttcgtcagtcccgaatacctctggtcgcagtatgcggcatgggccgccgacattgtgcagaagaacggtgagaacatgttctgtgcctatacgaacatctcgctggtgggctgtgtgcgcaagatcagcggttcgccggcctattccgacctgctgatcatcgtccccgccatggtgctgtttctgctctcctacctgcgcaccgggcagtacaaacacttcagctaccgcctgacgatgctggcttcactcctgttgttcatcgtgctgttcagcagcggcagcgaacacagcggctatgtgatagccgcgctcggcatgggtatctggtgggtgaattttccccccccccgcacgcggccggctcgaatggacgctgctcctactggccctgttcgccagtttctcctataacttactcccgactaagttctaccgtggcgtattcgtagcctacgcgctgcgttcgctgccgttcttcgccatctggctccactgcatccggaggctgtggcgcgaggatttcgccgtcacggacgtccttctggactacaaaaccctgcctgcggcagacgaggcggcaaacgaggcggcagaatcccgtcccgcgcggccgggcgacgggctcgacatcgtatgcccgtgttacaatccggctccggggttcgtccctgcgctggcccgctcctatgcggagctttgcgcccggtatccggacaagcgcctgcacctgatcgtcgtcaacgacggttcgccgcatggtttcggcgaggaacagcacggggcgctgcggcaggccgttccggatgtcgagatcgtcgatattccgcacggcggcaagggcgctgccatccgggccggcatcgcccgttcccgggccccgtataccatctatacggacatcgacatgccctatacggcggagtcgatgtgcgaggtgatcgaccgggtgttcgcagggaccgacgtggtgatcgccgtgcgcaaccggagttaccattcgcggctttcgcccatgcgcaagatgatgtcctacgggtcgaaactgcttaaccgcatcttcctcaacatccgccataccgacacgcagggcggtctgaagggcctctcgccccgcgctcgggcggtgatgctgcgcacacgcatctccgatttcctgttcgacaccgaattcgtcgtcctcgccgcacgcgacaaacgcctgcgcatcgaggaggtcgagaccatgctccgcgacggcatcgtcatgtcggcgatgtctccgcgggtgttgttccgtgaattgagaaactttttccgtatcgccatccgcctatgactgtgacactcggtttcgacgtcgaggagttcgattttccgctcgaaaggggccgcggaatcgatttcggcacccagcttgcggtcagctccgaggggctggagttcctgctggacctgctcgcgcggctggagctgcgggccacgttttacacgacggccaattttgccctccaccgcacggaccttgtccgccgcatcgtcgccggaggccacgaggtggcttcgcatgactattaccacgggctgaccgccgggtcggaccctgccggcagccggcggacgctcgaagagctgaccggacagcgcattgtcggctaccgtgccccgcggctggccgccgcttcgtccgcggcgctcgcggcggcggggtacaggtacaattcgtcgatcaatccgacgtggattccgacgcgctacaacaacctccgggccccgtgctccgtgtcgcgggaggaggggctcacgatctatccggtttcggtctccgcgcctttccgcgtgccgctgttttggatttcgctccacgtcatgccgctgccgctctacaaactgctgtgccgcagcgccctgcgccgcgacgggcacctgaacctctatttccatccgtgggagttttccgcacggctgcgcgagccggctttcggtgttccgggctatcttacgcattgttcggggacggacctgcaacggaaattcatccggctgctggagtggctgaaagcccgcggctgtcggtttttgaccacccgcgaatacctcggatgcgatgagtagggtagcgatgatgctccggaggctctatgagagtccgttcgtgcgcttcgccgtggtgggaggcgtcgccacggcggtcaattacgccgtttacgtcgtgctggtgcggtgtttcgacgacctctggccggcccttgcctatttttgcgccttctgcgtcagcatcgtctgcaactttctgctgtcgagctatttcacctttcgggtacggccctctgcccgccgtgccgtgcggttcctgacggcccacctcatcaaccttgtgaacgaactcgtactgctcgaaatctggctgtgggcgggcgttccgaaactctatgcgccgctgtgcgtttttctggtcgcctttccggtcaatttcctgatggtgcgcttcgccctgcgcgggcgtttgaaatcctgaaaaaacggaccctgccgtgcgatgcgcggcagggtctccttcttcatttattcgggtgtagcttgggctacttcttgatattgggcagttccagcccgtatttctttttccggtcttccgctttgagccacagtcccagcagcatcgccagcacgccgcatgcgacgaaaatcagcatcggacgggtgtagtcgtagggcattccctcggtccgtccggcgttgaaatatttgagtgcgaagccgaagagcatcgggaaaaggcacagtccgatgttctgaatccagaatatcagcgaataggcggaacccagatagcgcgtctccacgatcttcggaaccgagggccagagtgcggccggaaccagcgagaacgagatgccgagcaggacgatcgagccgtaggcgacgggcttgctcgggaactccgggagcacgaaggcgaaggtcaggtggcagacgatcatcagaatggcgcctaaaatgagcatcgtggcgcccttgcccttgtggtcgaggtatcggcccaggaagggggtgatggccgccgcgcccatcgggaaccagcggaaaatgtcggctgcggtctgggccgatacgccgaggttgctctccagcatgttggtggcgaagcgctggaaggggaagatggccgaatagtagagcacgcagaggaacgcgatgatccagaacaccttgctgctcaagatgtacttcaggtcgctgaccttgaactcctcctcgctgccgcctccgccccggctgtcgagacccagttgtttgtccagtttgcggtccatgaaggagaagatcacgaacgtcagcaggccgatcagcagcagcacggtgcagaatgccaccggtcgtacgaccgttgcgggagccatgtcggcgagccacggcgaaatggagaagatggcgaaaacgccgacgcgggcaatggccatctcaagtcccatggccagagccatctccttgccttcgaaccacttggctatggcttttgatacggtgatgccggccatctccatgccgcagccgaagatcataaagcccagcgacgccagtttggccgaggcggggaacgaggtccaccacgagccgagccacgtttcgatgcccgaacccgctaacgagtcgctcacggcgtagtatttcagacaggcgccgatgaacatcagcgaagccgacagttggccggtgaaccgcacgcccatcttgtcgaggatgatgcctgcgaggatcagaaatccgaagacgttgagtatgaactccgaactgccgtacatgccgaatacgtcgggggtccatccgcgctgtgcctcgatcatgctttgcagcggcgacatcaggtcgacgaacatgtaaccgaaaaacatcgtggacgcgatgagcaacaacgccgtccatcgggctgcggacgagtcgttgagtttacgttggatagtttctgccatatttttttgtgttgagttagttatccagtgatgcgtagcgtttcagcacctcgtaggcttcggtgattcccagttcgccggctttcgagaggtcgaggcagcccttgcgggtgtctttcataaacagctggatgatgccgcggttgtagtaggcctcggcgaatgcggggttgagtgagatggctttggtgtagtcctcgaacgcctcgggcaggctgcccgagagggccagcaggttggcgcggttgtagtaggcgtaggcgaagtcggggaagagcttcacggccttgttcaggtcggccaccgcctcgtcgtagctgtacgtgcgtttcgaattgttgttcagtcggttggcggggtccgagtcgatcgtgatccgctggtaggagttgtcgatcgacgagatgaagtcgatcatctcggcgcgcgtcgtcgagcggttcaggtagaggaacgggttcgacgggttcaactcgatggccgacgaataggtgctcaccgaattggtgtactgcttgatgagcgactgcgtgacggcgcgttcgaagagcacggtccatgcggggttgcttgcgttaagctcctgcacatactgcttgtcgagcatcaccagcgtgtcgggcgcgatgttgctctcgcggcacgagagggtgaggtattcgttgccgatgcgcttcttgaaatcgtcgacgcgttgcaggtgatagggtttggctgcgggaaccgagtcggggcgcatgagcgtgaacttgaacagcggcagcaggcgcatctcctcgtgtccgccgttgtggcccgtgatgcggtcgaagctgcctccggcgaacttgctgtcgaacgacagcaggcggtcgaagcgctgcgtggtgtcggcgtagatcgaataggtgctgtcgttcaggcgcgaacggtattcggcgattttccgctgggcgatcgagcggtcctctttggcgccctgcgggtcgcggagcagttcgcgcagccggccgcggtaaatgtaggcgttggcgaagtcggggtatagcttgatggccgaggtgtagtcctccacggcgcgctcgatctcgcccagctgggcgtagacgcctgcgcggttgtagtagaccagcacgttgttgggcgagtagagcgccactttgtcgtaatcctccagcgcgcggttgtagtcgccgatctgcgtgcgcagcatcgcgcggttgaaataggtcagcgagttggtcgaatcgagctggatcaccttgtcgaaatcggccagcgcctgcatcgggcggttggtggcgttgtagaccagcgcgcggttgaagtaggagagcaggtaggccgaatcgcactcgatggccttgttgaaatccgcctcggcctccttgtactgttcctgctggaggtgcagtccgccgcggcggttgtagccgttgggattctcgcggttggtgcgtatcgcggtgttgaaattctcgtaggcgcgcgtggtgtctttcaggtggaggtagctcaatccccggcagatgaaggcgtcggccaccttgttctcctggcggatgaacttgtcgaaatcgtcgatggcctccttgaactgctggttcagcaggcgcgtcacgccgcggctgtaataggggcccggcaggtcggggcgcagctcgatcgcctcgcggaagtcctgcaaagcgtcgtcgtagttgcccagacgcgagcgcgtgatggcgcggtaggtgtaggcctgcgtgtagacgggattgagccggatggccgtcgagaaatcgtcctcggcgcccagcaggtcgtcgaggttgtatttggcgatgccgcgcaggaagtagccttcgaaagcgtcctcgtcgaagcgcagcagggtgttcagcgtgcggatggcctcctggtagtcgttgttcatcatgcacgaacgtccgacccagaaaaaatattcccggttgtactgtgcgtgggctttcgtgccgcacagcagggcggttcccaatatgattccggcgatgagtttccgcatgctgactgattttgctctttaaacgggctttccgtgcgatttattattcctgttcgtatccgaacctgcgtaattgccgttcgttgttgcgccagtcgtcgctgaccttgacgaacaactggaggaaaaccttcttgccgaggaactgttccatgtcttcgcgcgccgtctgtccgaccctcttcagcttctcgcccttgtggccgatcaggatgcccttctgcgagtcgcgggccacgtagatcgtcgccgcgatgcggtcgatcgtcggctcctccttgtaactttcgatctcgatttcgcagcagtaggggatctccttgtcgtagaatttgaggatcttctcgcggatgatctccgaggcgaagaagcgcagcgtcttgtccgtaagcgtatccttggggtagaacgccgggccttcgggcagcagcgagaggatggtccggaacagcccttcgatgttgaaattctccttggccgacgtggggacgacctgcgccccggggatttcggcctgccatttgtcgaccagcgcttcgagcgcttcgggcgtcgagaggtcgatcttgttgatgaccacgacggtcggaatgccgctccggcggatgctgtcgacgatttcggccgagcgttcgctctgctccacggtgtccgtgacgtagaggatcacgtcggcgtcggtcagggcgcccgtcacgaacttcatcatcgactcctgcaacttgtacgagggcttcaggatgccgggcgtgtcggagtagacgatctggaaatcctcgcccgagacgatgcccatgatgcggtggcgtgtggtctgcgccttggaggtgatgatcgagagtttttcgcccacgagggcgttcatcagcgtcgatttgcccacgttgggattgccgatgatatttacgaagccggaacggtgcattttttttgctttattcgcagacaaaggtagggatttattcgaatttatcctatatttgttttacaatatgctaaaatcgcactgcctatgaaaaaatgagaacttttgattcttaatgccgctacggcggcacacgacatataaaagcgcatcggcttttcttcttacattcagaacttggacacttttgaatcacagagaggaattaaagttgatgctcgcgctgttttacggcgcgggcattcctttcatctttctgtgcaggcagtccaaggccttgaatgtggatgaacagagtttgtccgcgttttttgtgttttgacatttgctcgatgtaaaactctaactccttgaatgatgaaacgttttaatttgcttgtgtatgtttaccggggcataaacacgctggaagaaaaattcacccggaagaaccatcccgattacacatccgatttgagtaagcatgtcctgatcgtgacgggtgtatttatcggagcgacattaattacctcgctgctgggggtgtagttatgagcatgcggcacggaaatttctctcctaatttgtcggtcggcatgggcataggtctgttttttctttcaacgactccgtttctgtgttgtgtcgcctactggatctattatttgaaacggcatttgtatttgttctcgacgaccggtcagaaaatcggatatggactgttcacttgtgtgatgcttgctattctgggaccgtctattttcccgctgcttatagctcttattttgctgtccattgccatttcgatcgctttgttcctgttgagtgtcgtgatgacgatcattgccttgttcgacggaggaggttcgaaaaagaggcggttttcgctcgacaatggcgatgaggtgaccgaaaaatcgggattgttcggcgaaaaatattatgaaggccggagcggaaaatcctatgaaaccaacgataacggcaggacgttctccgaaaagtagcattcctcaccgggtttcacatgactgcaaaaaggctctcgtttccgagagcctttttgcaatgaagtcttgtaaaatgtagcctatcgccgcatcattccgcccggcatcttgggcatcttcatgccgccgccggccacggccttcatcatcttgcgcgtgtcgtcgaactgttgctgcgcgccgcgatgtcggccccttcggctcgcaaccgccggccgtgggcctttatcgtggtggataacaaggccttgctacggcaactggccgactcgctgccttatgcgcagagcgccgctgcggctccgatggctgtcgtggtgtgcggtgcgctgaccgagtcgcagggtgcgaccaatgccgggtggtgggtacaggatgcggcggccgcttcggagaacttgctgctggcggcccatgccgtcgggctggggaggctgtctggacgggcgtgtattcctccgaggatcgcgtgcgtgccgtccgcaacgtgctggggcttccccgccgcgtcgtgccgctcaacgtgataccgatcggttatccagccgaaaatcccgctctcaagcagaagtgggaccctgcaaaggtccgctgcaacggctgggccgagtaaacggaatccctgtgcaaaccgcagggattctttgctattgagcttttatccattcgaaaacggggtcgactccttttttgaaatctgcgaaactcatctcgatcgacatgtcgggttcgatggtctcgatctctttttccgagcgtttgaagtattttgttgaataattgaccaaaaccttcgaactcggaagctgaaagctgcggacctccccgaaatggttgggctttccggccgtctcttctccgacgaaaacggcattggtcagctgtttgaaatccatggcgttcagaatcgccgaggagaatgtatcgcgtcccagcaccacatataccgcaacttgcgggtgttgtttgagggcttgtgcgagtcgttcgacaaattcggttccctgtgatgagttgccgcctccgttgtaacgcatgtcgaaaatgagtttgtccaccggtttatcattcagcgtttcgaatgctttccgggtaaacgcctcgaacgacggcagcttttgcgcagcttccgcgtcgccccgttcagccgccagctcacggctgtgacatttgttgtaaagcatgtaatagatccgatcttcggggaaataacggctggtgaagaggactttgcggttggcggttgcgaaagcgagggagtcgggtctgaaatttacgaatgcattgtcgggatgtatcggctttaccacctgcgtctttccgtccgacagcataagcttgacttgccgggagtcggcaaatccgaagtgttcgagagcttgaaggctcatcaccgtttccgggacgattgacttcacgatcgcctggttgtcgatggtgaaaagagtgctcaaactgtcgatgaccgtcgcgatgggcgtgtcgttgatcgctacaatccgcagtcccaaaatttctttgttttccggggtcgttttcgtaatgtagagcccgtcgctgacccataatgtgccgagcggaagaatctgtgtctggtcaatcaactgaaagaattgcagcatggtgtgtgagtcgccgaagcgggcgatcagctgttgcgttttgagggcgacctgaaaatcagtcagtcgctccgactctgctttaatagcctcgattcccgatacaaactcccctttgctgcgggccgtaaaaaagttgcaatgcttttcgggcagctccttggtcagaaattccagatcggctttccagtcgattttccccgattgtgcaaatgccgcctgcatgcacgtgcagagcaacagcaagaggagtttcttcatggtttatacgttttctttcggtgaaggtgacgatttttctgtgatcttgcgtaatgtgctatttgagacgtccgcatgtaaacaaatcaggcaagccttggagcctgcccgatccttatataatactatcgccgcatcatcccgcccggcatcttgggcatcttcatgccgccgccggccacggccttcatcatcttgcgcgtgtcgtcgaactgcttcatcaggcggttgacgtcggccatcgtcgtacccgaacctttggcgatgcgttcgcgccggcgggcgttgatgatctcgggatgctcgcgctcggcgggggtcatcgacgagatgatcgcctcggtctgcttgaacacatcgtccggaatgtccacgttcttgagcatcttgcccatgccggggagcatcgacgcgaggtccttgaggttgcccatcttcttgatctgctgaatctgcgagatgaagtcgttgaagttgaactggtttttgaccagtttctttttgagcttgcgggcctcctcctcgtcgaattgctcctgcgcgcgttccacgagcgacaccacgtcgcccatgcccaggattcggtcggccatgcgctcggggtggaacacctgcaaggcgtccatcttctcgccgctcgaaatgaacttgaggggcttgttgaccaccgaacggatcgaaatggccgcaccgccgcgggtgtcgccgtcgagcttggtgaggaccacgccgtcgaagtccagccgttcgttgaactcccgggcggtgttcactgcgtcctgacccgtcatggcgtcgacgacgaacagcgtctccgaaggtttcacggcggccttgatggccgtgatctcctgcatcatcgcctcgtccacggccagacggcccgcggtgtcgacgatcaccacgttgtaattcttctgccgggcgtacttgataccgttctcggcgatctcgacaggattcctgttaccctcctcggtgtagacctccacgccgatctgtccgccgagcactttcagctggtcgatggctgcgggacggtaaacgtcgcctgccaccagcagcacctggcggcccttcttcgacttgagcagcgaagccagcttgcccgagaaggtcgtcttacccgaaccttgcagacccgcgatcagaatcaccgcaggcgtgccctccagccggatgtccgtggccgtgccgcccatcagttcggccagctcgtcgcggacgatcttggtcatcatctgtcccggcttgacggctttgagcacgtcctggcccagggctttctgcttcacttcgtcggtaaaggtcttggcgaccttgtagttgacgtcggcgtcgatcagcgcgcggcggatctccttgagcgtctccgcgacgttgatctcggtgatgcgcccctcgcctttgagaattttgaacgaccgttcgagtttatctgttaaattttcaaacatgacttctgaaattatccgagcgcaaagataatcaataattcacaaagcacaatccgccgtggaaattttgttatgccgtgaaaaatagttatgtttacaactgaacctaaccgtcatgcaatgaagaaatttcttttcctgctgcttgccgtcacggccgggaccgctccggcgcaaaccctcgtctatcccggcgagcacgaaatgccacccgtcccgaagaccttcgacaacgaactgggcgtgcgctacggagcgcagctttacgtgggcgacgggcggggacccgaattgcaggccttttcgatcgactatgcccgttataatttttacaatatcggttttcgaacggggctgaacgtcttcgtcgacgaggatgccgagaactatttctccgtgccgctgcaattcacctggcggaccggacgtatcgcctcgtcctggcgccgggagagccgggagcggagtgtgcagaataattactacaacggctcttatgcagatccttacggcgcttattccggcggaggggcggacgtgggcagtacgtttctcaacgtgctgcttgcgatcctgccctcggggttcgaggtccatgcgggctttaccccggggctgatgtgcgggccgttcacgaccgaaggctattcgacgaccgacccttcgtggcggccctataccgtccggcagcgtttctcctgtacgttcgacgcgggtgcgcggctgatcatcccgatctggcggttcaacctcttcggcgacttcacctatcactgctacctgaccgataatttccgggccggggagtttcggccttcgcgctcctatatggggctgggtgtggggctgtcgttcaatttttaggagcgggattccggaacggtccctccgttacccggtccctccgttacccggtccgtccgtcgctaccggagcagtccggcttcgtaataaatcacgatttgctcgatcatccggtcctcgccctccctgtcgtattccgacttgaggttctgaccgaagattttcgagacgccctgccagaatcccgccacgaaaccgccgcggaactccttcaacacctcgtaggcggtgtattcggtttcgcggtcgatgagtttcagcagcacgcggccctgcgtgcgggtcatgtgtttcagcacgggggtgtattcgtccttgatctcgtggtagatttgtttgatatactccttctgggcctttttggtcggcaggcggcacaactcctcctccatcgtcgccatcttggccttggcgatctgcgcgatggggtagacctttttcacggcgtccaccagccggcggtagcggcgcaggtcgaccgggcggctgaagacgtagaccggcaggacgtggaccagcgggatcgaatcgcccttctcgaccgtccactcctgatgccagaagccacggcctccctgcgcctgcgcttgggaaagcgcggcggcgagcagggcgatgaggagtatccactttttcaacggcggcgaattttttgtacctttgcggcggagtccggatgaaaacccgtgcggttttgcatccggtttgccggggtgtctccggcaaagataacgattcaccgcgataaacgaattacgaacagcgaatattatgcttgaaaaaggactttccgcccgcagcgccgcaaccgtcgccgccggcaacacggccgccgcgatgggttcgggcgaccttgcggttttcgccacccccgcgatggtggcgctgatggagaacgccgccatgacggccgttgccggcgaacttcccgaaggcgcgaccaccgtcggcgccgagatgaacgtcacgcacatcaagccgtcgggacttggcgccgaaatcaccgccacggccgtgcttgccgaagtcgaggggcgcaaactgaccttcaacgtcggggcccgcgacgccgaggggctgatcggcgagggcatccatgtccgctacatcgtcgaccgggaaaaattcatggccaaggtgaagtaatggaaaagctccggatcttctgcgtctgcgaaaagacgtacagcttgatttgtagttatttatgccggatcgaaggattgggctctgtgtttggacagggctcgatccttttcgtttgtgtacaattctgttcaagtcgcccgatgcctgtaaatttctgtgcttatactacttaatcttgctgaattattggcggttgaatttgcataattgatttttttcgttatttttgccctacatccattacaactacatattgtaattatccgtaagactctcgcgaacctgccttcaatgtttcatccttaaacttcaaactatgaaaactcgcattttgactttgacagcagccctgcttctactgggtgggtttgtcgcatgcaacgactcggaagaatccgaatatatcggcactcctcccgtcacagcctccgcggacgtatcggcttttttcaagacctatctgccttcgagttccagttcgcatcccgagccggaattcaatttcagcgagatcgatgatcgcgacatcgaatgttttgtgatcaacagcatggaagagttcgaggccgttgcacctccttcggtcgagctgccagtaatcgactttgacaaatatacccttattattggacagcattggatggggcatcccggatactctttcgagaagcaggccgtcgataccgaatccgataagatgacattgaatttggtgtataagcaactgaagggtggtactccggcgattatgactattttttatttctggggactatacgacaaacttcccgaaaaaacgcttactgtcaacaaaatcataatttagatattcttaatatcatgaaaaagctgctttctcttatcattgcagtcataacattttatggttgccagaatgtcattttgtcagaggaatatcaagaaaacgttcccgcgacccgtgcgtctgtgggttcgtctgattattattattggtgtgacggtgtgaaaatcccactaacggtcaacgagaacaagtcgtatgttttggttgaaaccgcaaaaattgaaagtgttcgcaaatcggccgtaaatatccgtgggggaaataccagaactattgataactatgctgcgctgggcataagatcgtcaaaagagttccgcatgcaaaaaagtcttacgtcgtttacgctggataacgcccaacaaaaatcgattaatccgcaggatgtagtgtatgaggctccctattttaaaacaagcgatggcgccgatctcggcataacgaatgtattcagcgtacaactgacaggagagcaagaccttgccaaacttcaaaaaatcgcggaagagtataatctggagatattgggagaaaacgaattcgacccgagtatctattatctttcgtgtacaaaggagtcgaaagggaatgcgctcgaaatggcgaattttatgtatgaatcgggcgcgtttgagtatgcaacacccgagtttttcgttgagtcgatgcccgacgccgctccgaacgatacctatttcagctatcaatggaatctgaaaaacgtctcttattcggggatcgatatcaattatgtgaacgcaaggaatgcctttgcttttccatatatcaacgatattatcgttgcggttgtcgataacggtgtttataataaccatgatgatttacatttgtataatgtcagttacaacgctcacacgggaggaattccaagtgggctatacggagatcacggcacaaaggttgccggtgttatcggagccacggctaataatggcaaaggcattgcaggcgttgcatccggagtgaaaatcatgcccatcagtatttgttatactgataacgagcttggcatagctgcctccaccacgaccaattttgcgaatgcaattcggtttgccgcaaataatggtgcgcgcgtaattaataattcatggtcatttgatacatcttctccaatatccgaaatcaataatgctataacatatgctcatggtaaaggatgcatcgttgttttttcatcgggcaataaaggcagtgctgtatcacagccggcagcgggagcaccttctgcaacgttagtagtaggtgcaatagatcggaatgggtacaaatcggatttctccggttatggttcttcattggatgttgtcgctcccgggcgtgaaatctggacaacagatgtgaccggtggatatacttgtgtgtcgggcacatcttttgctgctccccatgtttccggcatcgtggctttgatatgggcaacggatcccgatctttcggtatggcgggtacgcaatattatcgaacaaactacccgaaagatcggcggcaacacttatggtgtcgatccgcttcgattgaacggattatggaaccaatttgtgggttatggtctggtaaatgcctatgcagctgtatcagcggtttcggggcccgctcccaccgctccaaacatcgggacttcattgtcggaggtggaacccggcgatctttcgatgatgggtttggggtatgataaatggaatatagcgtatttggcccgtggagaagggcaagcaacgtgttctattgaaaattacgattcttctgtcacttatgtatggagcagcaccctgcctccgtacacgggtgagggcttcacatttaccgttgattttgcgtcggataccgatgaacccgtacttcacgatatcgaatgtcgggtgttgaaaaatggtctatccacatcttccggggtacatctggcattgattccgcaagggtactcttactaaattgatattggagttcctgacttacaaactgctgataatttggctgtaaatcagaggttggataaaaatattttatccaacctctgattatactgttatggggcaaacccgtgatcggcaatattctgggcgcacgacgcatccggaacttttcggtcaaagcccgatcaggacgtgttcgagccagatcaccgcgatgcccgccagatagccggacagggccagcagcgagatgcgtttgaggtaccagccgaaattgatcttttcgagtcccatcgccacgacgccggccgccgagccgatgatcagcagactgccgcccacgccggcgcagtaggtcagcaggtgccagaacagcccgtccgccacgaaactctgtgcgaaagccgggtcggcgctcgccgcagccgttgcgacgtcggccaccgggtacatgcccatgcaggccgccaccagcggcacgttgtcgaccaccgacgagaggatgccgatggcgcccgcgatggtgaacacttcgtggacattcttgtccagccagtcggccatgtcggtcagcacgccgccggtctgcaacgcgcccacggccatcaggatgccgaggaaaaagagaatcgtcggcatgtcgatgtgcttgaggactttggatacgcgcggctggatcgactcctccatgttgcggatgctgcgtttgcggtcgtagatgatttcggtcagaatccacatgaatcccagcgacaccatcatgcccatgtagggcggcagtccggtgaggcttttgaacaccggcacgaacagcagacttacgacgcccacaataaggatgaatagacgcaggcgcggaccgatgcattcggggcatcccgatgcgagggccttggcgctgaccgcggcggcggggcggtcggcgacgtagcggctggcgatggccgcagggatcacgaccgacacgaggcacggcaggaagaggttggcgatcaggttggcggccgtgacgttgccgcgcatccacagcatgatggtcgtcacgtcgccgatgggcgaccaggcgccgccgctgttcgcggcgatgacgatcacgctggcgaaaatccaccgttccttcttgttggcgatcaaccgccgcagcagcatgaccatgatgatcgtggtggtcatgttgtccagtgcggccgacatgaagaaggtgatgatcgccagcagccacatcagtttgcgcttgttgcgcgtggtgatgtggtcggtgatgacgttgaagccgccgtagctgtcgatcaggtccacgatggtcatggccccgatcaggaagaccaggatttcgcacgtgtcgcccagctggtccaccagctcgtgctggatgtgcgggtcgttgcccaggaggctgaacacggtccagatcgctccggccatcagcagggcgacggccgatttgtcgatcctggttttgtgctccagcgcgatgaacagatagcccaccacgaagagcagaatcattgtcggaatcatatcgtttgcgtttatttacagggtaactgaagcaaagatacgaaaaatccggcagaggtccggttttgtctctgccaattttgcatccgggggttggtttttgcgattttttgtttatctttgcagtcgctttcgagcgaatgtttgagctgtggtgtaatggtaacacagcagattttggttctgtcgttctgggttcgaatcccggcagctcaacacgaaaaggcggtcatgcgaccgcctttttcgtgcatacgttcgtttagcggatcttgtggtgtgagatgagcgcggcgatccacagcaggatgaccgagccgatgacggccgtcgccagactgcccagcgtgccgacgggaacccatccgaagagcgaaaagagccagccgcccagtatgccgccgatgagcccgacgatcaggttgacgaagagtcccgaacctcctcccttgacgatcaggttggcgatccatccggcggccagtccgatcagcagataccatagaaaatacatagtcttgcattttggaacgcttttcggagtgcaaaatccgtacccggccgggccggggcgttttataacgcctttttcagcgcttttgccagctgatcgggacacgacgtgccgcggccccggcagtcgatgccttcgagccgggcgacggcttccgctgccgtcatcccgcgcacgagcgccgcgattccctgctggttgccgtggcagccgcccgtgaaggagacgcttcggacgacgccgttttcgagttcgacgtcgatttgccgggagcaggttccctggcagacgtgtgttattttctgtgtcatggagttacgattttccggtttgcgggggcgaagatacgaaattcggagcctttcacaaaatgttgaaaacttcctgctccggaattttgaaagtcggggaataatggagacttttgtgacccgcaaaggtatccttcgtcccgccggggcggaggataagagggaatcgggtgcgaatcccggacagttcccgctgctgtatgcacttcaatgccgcaggcgaatcgtcgagccactgtcccgctggggacgggaaggccgcctgcgggtcggtgcgagtcagaagacctgcctttgcgcatgcaatgtcggccctgcggggaaacggggcctgttgtgaaacgtatatactcatattacaatggattacacgcagatttccatcatcaaacgtgatggtaaaaccgagcctttttctctggataaaatcgtccgcgccatcacgaaggcctttcgcgcgggcggcataacggacgaggggcaggccgtcgagcagatcgcatccgacgtggcggcggcaattacgaaggccgagatttcggtcgaggagattcaggacatggtcgaggagcggctgatgaaacgcaacccctcgatcgccaaacgttatatcatctaccgcgagtggcgcaacgtcgaacgcgaccgccgctcgtcgatcaagagcgtcatggacggcatcgtgaccgtcgagaagaacgacatcaacctttcgaacgccaacatgtcgtcgcacacgcccgcggggcagatgatgaccttcgcctcggagatcaccaaggactacgccctgaaatatctggtgggcgtgcgccacggccgcgcccaccgcgacggggacatccacattcacgacctggactactatcccaccaagaccacgacgtgcattcagtacgatctgggtgacatctacgaacggggattctcgacgaagaacggctcggtgcgcacgccgcagtcgatccagagctacgccacgctggccacgatcgtcttccagaccaaccagaacgagcagcacggcgggcagtcgatcccggcgttcgaccatttcatggctccgggcgtgctgaaaaccttccgccgtcacctgaccgacatgacgctgttcctgtgcggcgtgcggggcggcgtgacgctggagcgcgccgagctgaaggccctggtcgccgaacacgtgccgacgatcgaaccctgcgagacggcggtggggcgtctgttcgccgccctgcgccagtcgggcgtggaggtcgccgacgaggacatccgacgcatctggcggcaggcatacgacacgacgcgccgcgagacccatcaggcgatggagggattcatccacaacctcaatacgatgcactcgcgcggcggcaaccaggtggtgttcagctcggtgaactacggcacggacttttcgcccgagggccgcatggtcatccgcgaactgctttccgccacgatcgaggggctggggcacggcgaagtgccggtcttcccgatccagattttcaaggtcaaggagggcgtttcgtggtccgaagaggactatgccgcagcggtgaaggacttcgacaaggcactggctggggagatcaagttcaaaactccgaacttcgacctgctgatcgaggcgtgccgcaccacgtcggtggcgctgttccccaacttcatgtttctcgacgcaccgttcaaccgccacgagaagtggcgcatcgacgaccccgaccgcttccgctacgaggtggcgacgatggggtgccgtacgcgcgtcttcgagaatctgcacggcgaaaagtcgtcgtgggggcgcggcaacctctccttcacgtcgatgaacctgccgcggctggccatcgaggcgatgcgcgaggccggggacatgattcccgacggcaacaaacacgcgatccgcaaggaggcgcgcgaaattttcctcgaatcggtgcgcaagaccgccacgatgatggccgagcagctctacgaacgttactgcttccagcgcacggccctcgcgcggcagttcccgtttatgatgtcgaacgatgtctggaagggcggcggccggttgcagcccaacgacgaggtgggcgacgtgctcaagcacggcacgctgggcatcggcttcatcggcggacacaacgcgatggtggcgatttacggcgaaggccatgcgacctcgaaggaggcgtggcagacgctctacgacgccgtgacggtgatgaaccgcgtggtcgaggagtacaaggccaaatacgggctgaactattcggtgctggcgaccccggccgagggattgagcggacgcttcacgcgcatggaccgcaagcgttatggggagattccgggcgtcaccgaccgcgactactacgtcaactcgttccacgtcgacgtgcgcgagccggtttccatcgtcgagaaaatccgcctcgaagcgccgttccacgccatcacgcgcggcgggcatatcacctacgtcgaactcgacggcgaggcccggaagaatcccgtggcgatcctcaagatcgtcaaggtgatgcaggacgaggggatcggctacggctcgatcaaccatccgatcgacacctgccgcaagtgcggccaccgcggggtgatctactcgaaatgtcccgtctgcggttcggacgacatcctgcgcatgcgccgcatcacgggttacctgacaggcagcctcgaatcgtggaactcggccaagcaggccgaggagcgcgatcgggtaaagcaccggtaatttcgattctcaccggcatcttttgcacttcccttgcggggcgaaacagttacatacgttcgtatgctcctgcttcgccccacttcacgaagcccgaaaaccgctctgcgataatcgaaattggcggccccctgtccgcccgcctaaaatcaaaattcacccggcggaagaatccctttttgccgccgtctccggtcgcgtgcggcaagtccccgcctaaagtttagaggtgggtcagatttgtaaacacggcgttccgccgtgaatcgcgaccgacggagttgtattcatgttatgaaaacgcaatggaattattaagaatcatcggcatctatcccgaaaccatctccgacggttacgggctgcgctatgcgatctatttcgcggggtgcgcgcaccgttgtcccggctgccacaaccccgagagccacgatccccggcggggcgagccgctgaccgtggagcgtgccgaaactatctgcgccgcaatcgccgcgaatccgattctcgacggggtgacgctcagcggcggcgatccgctgttgcagcccgaagccatggcagcctttctgcggctggtgaaggagcgcacggggcagaacgtctggtgctatacgggctatacgctcgaagagtgtctcgccgacccggcccgccgggagtgccttcggtggatcgacacgctggtcgacggacgctacgtcgaggcgctgcgcgatctgtcgctcgatttccgggggagttccaaccagcggatcatcgacgtcggggccttgcacctgttcggataggtgtgtgaaaaaagagctgcaaatccttgcagctcttttttatgcgcgggttatctctactgacgctggaggtccgaattgtcggctacgaccatgtttttgtcgatgcgcagcgtcacattgccgtcgacctcgatcagcagggtggtctccttgatctccttcacgacgccgtagatgccgccggcggtgatgactttgtcgccttttttcagaccgttgcggaactcctgcatctgtttgcggcgcttggcctcgggacgccacatgaacaaccagagaaccagcaccatgaggccgatcataataatgaaactgtactgctgcatgaatcccggttgaggctctatggggaccgtctgaagaaaattaatcataattgtattcgttttaagtgtttattccattgaacgaagcaaaggtacaaattattgccgaataaacaaggatttattttatgtccgcttccacgaacagccgcaggggccgctgccctcccgccagcgtgatgtccagcgccttgagttgccagccccgttcgccgcgcgaatcgaaggtgagcgtcacctgccgtgcgtcgcccggtgcaatcggttgtgcgtcaaattcgagcgtcgtgcatccgcagctgcgccggtaggaggcgacggccacgggacggctcgcgtcgttggccagccagaggcgcagcacggcgatttcgccggacccgaggcgtccgaaacgcacggtgtccgtgcctcccgtggtgagaatcgaatccgttagcgagataatccggcccttgcgttcgaccgcacggggagatgtgccgcagccaacggcgagtgccgccagggcgaggatcgcgagcatgcgggtcatggccggcaggggtcagatcaggccgcgcccggcctttttgatgcgtccttccgcggtcagcgactcgacgatcttgtccagcacgccgttgatgaaggtgctgctgcccggggtggagtagtatttcgaaatttcgatccactcgtcgagcgtcaccttgacgggaaccgacgggaacgaagtcagctcagccatcgccgtgccgatgatcaggttgtccatgaagacgatgcgctccacgtcccagttggccgtgaacttctcgatgtagtcctggaaggcggagtagttgaccagcgacttttcgaacagcgtcttgacgaattcggggtcctcgctgcttttgaacttcgcgggaaccttcagttcggtgtgcgagacgcgcaggttcgaaagcgtgcgcaggaccatgatcacgatgtagggaaggtcgtcggtccagaggatcgacatctcctccagcacgtcgtccagcgcctcgcagctctgcaactccttgaagaagtcctcgagcagctttttgtcgtcgtcgaacgagcgctcctcgcgctgcatgtagtccttgtagtagtcgctctcggtcaactgcgcgtagagcgtgcggatcagttcgggatagcgttcccatcccagtttgcgggccgccacgtgatcgttcaccgcgtcgctgttggcgatggtgcggatcacggcgttgtccacgaacttggtgttggggttgaggtcttcgaatgtcggcagtttcttctgtttggccagctcctgacgctgttcggcgtaacgcgcgatctccacggggaggatcagtatctggaaatagaggtcataggccttgtcgacggacgccatcagcgttttttccgacgccatcatgttatccgcgcccgatttgagatgggcgaacagcgccttgacgacctttatacggagtaatcttctgctcaacatttttttagaacgatttttaacggccgcaaaaatacaactaaaaatcaagaataaaaaattaagccgggagaattctttctccgggcgatttccgcgcggccgtcgcggcggattccggcgtatccgaaaaaacgggaggcgcgatggcctcccgatgctgcaactacttttcccggatcgactttttcttgcctacatgactttgatagacacaataaacgattccggccacgagcaggacaaggatgcaatagccggtgcttcgggcgctggctttgagcatgctttcgagagacatttccggatagagaagcgcgaagacacaaagaaaatagatgaagcaggcgcccatgtttcgcaaggtgaggaaccgggaaatactcaaatcgtcgtctttcgtctcttttgcatcgggaaccggacacgtatcgggacgtttatccggaccctttctgattcggttccaaaaatagacggccgaaaagatcacgatgcttacgatcgtataaatgacgatgcaccgcacgaggcgtcccggagagcaatcttttccgggtgtgggcagaaacgctataatcatcagaacgacgtagaaattagccaatcctttgagaaacactttcagctcggttttgttcatggcagattcattttaaattccctcttcggcctcgcctccgaaataatagcaatggcgttttatattggtcctaatttaggacattggattttgaaataaaagaggcgaacggataaatagaaaaaaatatactgaattgcgaaagaaatatactctgccgaccgcctgcggggctctttgcatcctgatttttaatttttaattcttaatttttaatttgcttttgcctatctttgcacccgtatggaacaattggaagaaaaacagcctttcgacgtgatcgtcatcggggcgggcgctgcgggcatgatggccgcgggtacggcggcgcgcagcggcaggcgcgtgctgctgatcgaaaagatggagaagtcgggccgcaaggtccgcatcaccggcaagggacgatgcaacgtcaccaacgcgcgtccggccgaggaattcgccgatcaggtgcgcaccaacgccgaatttttcaaggtcgcgttctcggagttcaacaaccgggcggcgatcaagtttttcgaacgcgcaggcgtgaaactcgacatcgaacgcggcgaccgggtctttccgcagagcggcaaggcgtgggacatcgccaacgccctgctggagttctgcgtcgaaaacggcgtcaagatcatctacaatacgcgtgttacggagattctgaccctcggggaccgggtcttcggtgtgaaatacatcaaccggcgcggtttcgaacgcaaggaggagtgcgcgcaggtgatcctcgccacgggcggcgtctcctatcccgcgaccggatcgacgggcgacggctatgccttcgccgccgacctgggccatacgatcgagccgctgcgtccgtcgctgacgccgctcttgtcgtcgcacgcccagatgagatacctcgacaaggtgctgctgcgcaacgtgcgcgcgacgctctatgtcgataacgaacccgtgcgcgaggagttcggcgagatcggattttccgaccgcggcatcgagggcgccgtggcgctgcgcatgagccgcgacgcggtggacgccctgatcgaagagaagcgcgtgaagctggtcctcgacctgaaacccgcgctcacggaggaggtgctgcacgaacgcatcgcccgtgaaatcgccgagctgcaacccaacgagttcttcggcgaactgctgcgcaagctggttcccaagccgctggtgatgccgctggcgcaggaggtggacatccgtgcgaactgttacgtcggcaaaatcaccgaggaacagatcacgcgtctggtgcgtacgctcaagggactgactttcccgatcacggactatgcgccgttcgaatacgccgtggtgacggccggcggcgtgcgctgtgacgaagtgaatccctatacgatggagtcgctgaaagtcaaagggttgtattttgccggcgaggtgctcgacatcgacgccaatacgggcggttacaacctccagatcgccttttcgacgggccgcctggccgggtcgctgaaaaaatagacgttatgaagatcgtcggccatcccatttctttccggttgcccgggcgggtttccgaactgcgcaaccggctctcacgcgcccgttatttccgcggtcacggagtccattcgccgttcgtctacgacattgtgcgcagcgtcttcatgcgcgacgacctgctgccgggccgccgggacctgtacgaagccctgctcacggcgggcgtttcccgccgtcgggcggtgcagttgcagaatctgatgattcattgcggctatacgacctttggtctgaatcgtgcggatgctgaattctgcgtcgccacgtgcggcctgccgcgccctgcgacgctcgcgctggtgcgtgcggcggccgaagcggggcataccgtggcgctgatgtcgccctacgacggctgcgaacggcaagcgctgtgcgggcagattatcgcgggacacgcttcgacgacggtggataaccgcggttacctgctgattttcaacaaccatttgccgaaacaacatttcaggatatgaaggtatacacgaaaacgggcgacaagggaatgacctcgctgatcggcggcgagcgggtcttcaagaccgacgaacgggtcgaggcttacggtacggtcgacgaactggctgctttcacggctctgctggccgacaacatgcgcggcgacgctgcgttggcgtcgtcggtcggcgacctgaaccgcattctttcgcggctgatgtcggtcgaggcgctgctggccacggggcagtcggggagcgacaaggtcgctccgctggacccggagaccgttgcatggctcgaagggcgcatcgacgccatgcaggaggttctgaaaccgattgataaattcacgattccgggcggaaacgctgtggtgtcgatgtgccacgtgtgccgcaccgtctgccggcgcgccgaacgcgccgcgctccgtgccgacgccagatacggcgtcgactccacggcgctggtctggctgaaccggctttcggactatttctacctgctggggcgcaccctcacggcccattatgccgtcgacgaggtcctgtggattccctgacctggccgggtatgtaaaatgcgaagcggcacattccgggaatcgtgccgcttcgcattgatttattttgaggccgccggcctcaaaatcgctttttagtattcttcctcgttgaagaagaaatcgtccttggaggggtagtcgggccagatgtcttcgatagattcgtagatttcaccctcgtcttctatctcctgcaggttttcgagcacttcgagcggcgcacccgaacgtactgcatagtcgatgagttcatctttcgttgcgggccagggggcatcttcgagtttcgatgccagttcaagcgtccaatacatagtcacaatatttttaagttcccaattgtcaacggattatttgtcctcaaggggtgttaacccgttatggctgatttgcaaaagtataaaaaaaacgagaaaaacaaagaaaaatcggcaaaacatcgtgcgtgtgttattatgtggttggtaaccaatgttttgagcggtgaaaaaaactcggctgcaaattgcggcgaaagggttttgcctcctccggcgggcggcgttccgtggaatatgccgccgtcgtttttttgcggagttcgttttttatcgtatttttgttatgattcgaaataatacgacttattttaaaaacgaaaaccccgactccatgatccgcatcagccgctttttcctgccgtttctctgttgtctgacggcgcctgccctcgccggtacgcaaacccgctgggaggtggttcccgacagcacggccatcgtgtggaatgtccgcgagggcgattcgcaccgggaccatatcgaaatgagcggattgcggatttccgccgtcctgcgctacggtgtcggcgccgacggcagtttccggttcgaacgcagtatcgtgtggccgatgctgcgcaccatcccgaacaatacgcacggttcgctgatgcggcgtttcgtgtgggacgttccccggatgctttcggtcaatgagaattgccttcagcaggagaaggtccgccggatcgtgctcgacggcacgatgaccgtcgagagcgactggacggcggtcaaaggctcgctttcgctgacgcgtgtccttttcccgtcggtcgacgaggctgccttctgcgaaaaatacatcctgaagaatacgggcgagaagccgctttacgtcgagattccccgggcgcgttcggtgatccggacagctccggcaaagggcgtggagggcagttacgaactggtggccgagatctgcggcgacacggcgctgatgctcgctccgcgggccgaggtcgctttcggggcctttttcagcggccgccggtccggggacgaagccttggcgctgaacgccgacgcggagtgcgccaaacgccgtgcgctggtggccgaatggcagcgcaatctggtgctggacacccccgaccccgtgatcgacgccatgttcgcctttgcgaaaatccgcgctgcggagagcatctacgacaccaagggcggtctgatgcacggtcccggcggcgagcgtttctatgccgcgatctgggccaacgaccaggccgagtacatcaacccgttcttccctttcctgggctacgaccggggcaaccgctcggcgctctgctcgttcggctatttcgctcgctacatgaatcccgactaccggccgattcccagttcgatcatagccgaaggaaccgacatctggaacggcgcgggcgaccgcggcgatgcagccatgatcgcctacggtgcggcgcgttatgcgctggcgcgcggcgatgccgccgaagcggccgaagtgtggccgttggtggagtggtgtctggagtactgccgccgccggctgaccggcgacggtgtggtggcctccgattcggacgaactggaaggtcgcttcccggccggggacgccaatctgtgcacctcgtcgctttattacgacgcgctgctctcggccgcaatgctgggccgcgaactgcataagcccgcccggcagctggccgcctacgaacgtcaggccgccgcgctgcggaaaaacatcgaccgccatttcgggggcatggtcgagggcttcgacacctatcgttattatacgggcaacgaccgtctgcgtgcgtggatctgcattccgctgaccgtcggcatcgacgaacggaaggaggcgaccgtcgaggcgctcttttcgccgaaactgtggaccgaaaacggtctgctgacccggtcgggcgacaagaccttctgggaccggtcgacgctctacgccctgcgcggagtctacgcctcgggcgagaccgagaaggccaccggctatttgtcctattattccggggtgcgcctgctgggcgaccatgttccctacgccatcgaggcgtggcccgaaggttcccagcgtcatctttcggccgagagcggcctttactgccgcatcctgaccgaaggggtgttcggaatccgtccgacggggttccggtcgtttaccctgacgccgcgcctgcccgcggcgtgggaccgcatgaacctgcgcaacgtgcgcgccttcggctcggcgttcgacatcgaggtgcgccgtgcggcgaaggggatggaggtcgccgtgacgcaggacgggcgggaggtcgtccgcaagaggctccgcgcggggcagagcctcggggtgacgctggaatagaaaaagagagggaggtttccgaaaacctccctcgtttatttcaccgcgatgtagaacaggtcgaaacaaccgtctcccaccggttcgatgcggtagtcgtccatgcggatcgaggtcgtcagcccggtgttttcccggaggagtttgcggcggttcatgcggttgaggatgtcgtaggggatttgcagcatccagcgcggcaggcggtgctggaggtcgagaatgtcgaagcgcgtgatgcgttcgacgccgcggcggttttccgcatagtagtccatcaccttttcgttgccgaagaccccgagggtttcgatctccgaaaaccgtgcggcgagcagcctgcggagttgttcggccgtgtattcgcgcacgtgccacgggttgcgggtgagcgacatcggggcgttgggggtcgtcacgatgaaccgtcccccggggcgcagcacccggtgtatttcgcgcacgaactccgcatcgcgtttgatatgctcgatcacctggaacgagatcacgcagtcgaaacttcggtcggggaagtccagcggcgggaccactgcctgccggaactcgacgttggggcggtcgagcagttccggcgccggggcgtgcttgtcgacggtgacgaaccgccgcgcccggggcgccgctacctcgatgccgtagccggctccggttccgatttcgagcacgtcgcccgcgatgcgcgccgaggcggcgtggtaggccagcagcgagcgctggaaaacgaaattgtccgaggcttccgccgaaacgcgctccgcggtgttaatcttcgccatgtttccggattttgatgcctttttcgccggcttcgaccgcgccgcgcttgaggagcatgcccagcgagcgtttgaaaacctttttgctcgttcccgtgaggcgcgtcacctcctcgggggcgctgtcgtcgttcaggggcaggaatccgccgttgtcgcggaccagctggagcagcacctccgccgagtccttcacctgtgcgaatcccgtctgctggaggctcacgtcgatgcggttgtcctcggtgatacgcctaacgtaacctttcagccggtcgccgacggccacgggacggaagatctggttgcggtagatcatgccccagtggcggttgttgacgatcacgcggaagccgatttcgctctccgaggccaccagcagcgagacctcctcgcggggtttcaccgtgatcaggtcgttgtttatgaaactcttgagtttggtcgtggccacgcagcggcccgtgatgttgtcttcgtagaggtagacgatgtagctgtgtccggccaggatgccgccctgctggttgcggttggggaggaacaggtccttgccgtgcagtccccagtcgaggaaagccccgtgggccgtcttgtccaccacgcgcagatagcccgcttcgccttcgcgcagcagcggcgtttcggtcgtcgccacgaggcggtcctccgagtcgtggtagaggaagacctctttccggtcgccgaccttgtccgtcagcgaagtgtagcggttggggagcagcacttcgttctgctcctcgtcggcgaggtataggccgtattccgatacgcggcttacggtgagggtttgtatgcgtcctgctttcaacatggtttttccggtatatacgctgcaaaagtacgtttattttcgtccgaatccaaacttcgcgggccgtactgccggaagatgcggcggatttgccggcttgcggagcgaaagttttgcggattggccgaaaaaccgtatctttacgaaacgtaaaaatctcccgaaatgatgaaactacgccgatttctgttcctgctctgggcgggattgctggtagcggccgccgcgtgcgcccagcctgtcagcacgctttacgacaagaccgaataccgtatcgccatgcgcgacagcgtgcgcctgcacacctcggtcttcacgcccaaggcccccggcaaggccccgataatcattttccggacgccttacggtacgggaccttacggcgagggacagtttcccggcagtttcgaaaaaggctacatgcgcagctacgtcgaccgcggctacatcatcgtccggcaggacgtccggggccgctacatgagcgagggcgagttcatgcacgtgcgtcccgcgggcttcggcagcgtggacgagacgacggacagctacgatacggtggactggctggtgaagaacattcccggcaacaacggccgtgtgggtttcgcgggatgctcctacccgggattctacgccctgatgggcggtttgagcgggcatccggccgtgaaggccgtttcgccgcaggcccccgttacggactggtacatgggcgacgacgtgcaccacaacggcgtgctgatgctgagcgacgccgtgcggttcctcaattcgatgaacacgcccgctggacacgagccgaccgacaagatgccgcggcgcgggctgacgatctcgcccgacgaacgcacgttcttcctcacggagcgccccacgcgggctgacctgacgaaactgctggcacccaatgcgttctgggaggagatggccgaacatcccgactacgacgagtggtggcgcgcgcgcgacacgcgccgggcctgctacaacatccgtcccgcgatgctggtcgtgggcggcacgttcgacgccgaggattgctacggggcctggaacctttacaaagccgtcctgcgccagagcgcccggactccgctccatctggtcgtcgggccgtgggcccacggggcatggcgcggcgacgggcgtacgctgggcgacttcgatttcggagaggaggcctccggagcctactatatggaacatttcgaggcgccctttttcgactgctacctctgggcgcgcgacacggtcgaccggctgccgcccgtggcggctttctcgtcgggcgacaaccgctggcatacgttcgggcggtggacgccttccgaggcccgcaaactgactctttacctcgccgacggcggccgcatcacgaccgaaaaaccgacggtgaaaaactcctcgacgagctatacgtccgatcctgccgaccccgtgccgtatatcgcaacctccggcacgcggcgtcccaaggagtatatgatcgccgaccagcggtttctggagggccgcaaggacgtgctgacgttcgtgaccgaaccgcttgcggaagacgtgacccttgccggtccggtcgaggcttcgctgaaagtggccctttcgacctcggatgccgatttcgtcgtgaaactgatcgacgtttaccccgacgagggtgaaaaggccggcatgcagatgctcgtccgcggcgacgtggtgcgcggccgttaccgcgacggcttcgcgcgtccgaaagccttcgtgccgggcaaccccgagaccgtgcctttccgcacgaccgacatcgcccacacgttccgcgccggacaccggatcatggtgcaggtgcagagttcgtggttcccgctcacggagcgcaatccccagcagtatgtcgacctgtggcgctgtgcggcgtcggatttcgtgccctgccgggtgacgcttttccaccagcgcgactgcgcgtcgtcgctgaccgtctataagctctgattttcgtggaactccgcatcgccctctgccagtgcgacatcgcctgggaacagcccgcgcggaacctcgcgcggctcgaaccgatggtcgctgccgccgaagcggatgtcgtgctgctgcccgaactgttcgccacgggcttcacgctcgatcccgccggagtggccgacggggccggcggggcggtcgtcacggccctgcgccgctgggccgcccgatacggcaaggcggtcgcaggcagcgtcgccgttgccgaaaacggacgtttctacaaccggatgtatttcgtgaaaccctcgggcgaatttatcggctatgataaacgccatctgttcgcacccggcggcgaagcgcgccagtacacgcccggcgacagccgtgcggtggtcgaatacggaggcgtgcggttcttgctgctcgtctgttacgatttgcgttttccggtctggagccgttgccggggcgattacgacgccattctgtgctgcgcctcgtggcctgcgccgcggcgcgaagtgtggcggacgctgctgcgcgcccgggccatcgaaaaccagtgctatgcggccggggtgaatcgggtgggggatgaccctgcggcccgttacgccggggattcggcgttggtcgacttcaagggccgcacgatggtcgaagccggcggcggggaacgaattctgacgggcgtgttcgacacgggggcgctggcggcgttccgcgaaaaattccccgcgtggcgggatgccgacgaattcgttttaaaatagacgtgtcatgcgcgcgggggacgccaatgcctgttatttttcccttcagacgattatttccgctgatttattttgaattcagcggaatttgaatacctttgttttcagctatgaaacgatctgacagcgatagaacgggttttcgttcgggaaatgaaacgggaggtaaatttcttccccattggctctcggctgtcgatcgacttaccccccccctcgcgctgttccggttgaatttctgaatccggctttccgcgattatataatgactctgacaaggggttgttgtgttttgtcgtgtcgtatctcgaaatcactctcatccaataaaaaatgcgtatgaaatccaaaatctttacatcgttcctgttggcggcagtgctgctgtcgggatgcaagaaggacgatccggctccggataaggcgactttgtcggtcagtccccaaactgcgattgcctttacggctgcggcgacggagaccttcaccgtaaaggtcgtcaccaatcaaccggcgtggaaagccgagtcttcgcaaagctggtgcaaggtcgctgcgggggagggtcagtttacggtttccgccgatcccaatacgtcggaaacagctccgacgccggcggtgattacggtgacggccgggagtgaaaaggcgacgattgatgtcacgcagtccgccgccgggaaggagcaatatcccgataccgaggccaaactgaagcaggctatcgccaaagtgtggacttttgcggagagttcgaactatgtttcgctcgagttcacgaccgacggcctttatacgtttttatccaaaacgccctttacccgggctgcggagaataatatctacctgctgtcgggcgcctattccgttgctgccgatctgcacgaactcacgttgagcgatttcggcaaaatcaccatcagcgacgtggggaacggcaaagcctccatgacgatcgccccgaccggcggaactccctccgcggcggaactcgacgagcagcgtttcgtaactcccccggcgtcggcggataagaagatcaaacgggtcgagtcgaaagaacctacggagggaaacggcgctatcgaatacagttacgatgcgaatcggcggatgtcgaagattaaggtaacacagggcggcctgacgctggaaattccgatcaattacgaggatggcaaagtctggtatcagttcgaaggcggcgaggtcctcggagagccgggcgtgtttaaggttacctatacgctcaatgcggcggggctggcccgctcttcggttattcagcacaaaggcgtcgtgctctataagatatactatacttataacaaccagaggcagctggtctcctatcggatgacggacaatgccgggaaactcgacgggttttgcaatgccacgtgggtgaacgggaatgtggtgagcacttattccgagagcgtgcacacctgtgacggcagttatgatgagtatgacgggcataaatattaccatcacgaccataacggcgacggcattttcaaccaggaagatattatcacccgcgagacggaccatagcacgtacagctattcggcccgggagaacaagggtggctacatgtatccgatcgttacgcccgatatattcggctcttccgatgttttcgatcagttgggccagtggatcggcgtgctcggcgtctcctgcaagcacctgatgtcggaacatgcggatgccgacggtgcgttgacctaccaattcgacgccgaagggtatcctacgcgcatcgacgtgtcgttcccggaggatccttccgataactggtatatcctccagacctacgagtaggggcgttaataccggtgattcgtgtaaagtccgtccgaaatgccgcaaggcattcgggcggacttcgttttttcagcgtcggaaccctgaccgcgacaactgcggagaagacaatgtattgaaaaaaaacgtatctttgcacgttgctgatttgcgatccaataaaccggacgttccgcacgtttacatacctgaaatggaagatacgatcaaaatactgggcgcccgggttcacaacctcaagaacgtggacctcgaaattccgcgccgcaaactggtagtcgtcaccggcctctcggggtcgggcaaatcgtcgctggccttcgacacgatctacgccgaggggcagcggcgctacatggagacgctgtcgacctacgcgcggcagttcgtggggacgatggagcgtcccgacgtggacaagatcacggggttaagccccgtggtggccatcgaacagaagacgaccaacaagaatccccgctcgacggtgggcaccgtgaccgagatcaacgacttcctgcgcctgctttacgcgcgggcgtcgcgggcctattcgcccgtgacgggcgaggagatggtccactataccgacgaccagatcgccgagctgattctcacgggcttcgccgggcgtaagatcgccctgatggcccccatcgtcaagggccgcaagggccactaccgcgaactgttcgagtcgctggccaagaaggggtacatctatgcgcgcatcgacggcgagatccgcgaaatatcgtcgggcatgcgcctcgaccgctacaagatacacaccatcgacctggtggtcgaccgcctcgtggtcagcgaggagtcccgcgaaaggctgatgacctcgctgaaggagtcgatgcgccagggcaagggcacgatggccgtccacgactacgggaccgggcagcagcgtttctactcgcgccacctgatgtgcccctcgacgggcgtggccttcgaggaccccgcgccgcacaccttttcgttcaactcgcccaagggcgcctgcccccattgcaacggactgggcgaggaggcggttttcgacgtggggaagatcattcccgatgcccgcctctcgctgcgcgaaggggccgtcggaccgctgggcaagtaccgcaacaacatgcttttcgccattctggagatgctgggccgccgttacgatttcacgctcgacgatcctgtcgaaagtttctccgaggaggcgctgaacgccgtgctctacggcgattccgagccgctgacggtcgacttgcaggagttctcgtcttcgggcggacgccagttcctctcgtgggagggcgtggccgagtacatcggccgcaccgaggacgacgattcgaagcacggccagaagtggcgcgaccagttcctcgtctaccgcaaatgttcggtctgcggcggttcgcgcctgcggaaggagtcgttgcagttccgcgtcgccgggaagaacatcgccgaggtgtcggccatgtcgatttccgagttctcggagtgggttcccaccatcgaaaaacagctctcggagaaggagtggaagattgcccaggagatcgtcaaggagatccgcgaacgcctgcggttcctgatggacgtggggctgggctacctctcgctggcgcgttcgtcgcgttcgctgtcgggcggcgagagccagcgcatccgcctcgccacgcagatcggctcgaaactcgtcaacgtgctctatatcctcgacgagccgtcgatcggcctgcaccagcgcgataaccagcggctgatccgcagcctcgaagagctgcgcgacgcgggcaactcggtgatcgtcgtcgagcacgacgaggacatgatgcgcgccgccgacttcatcgtcgacgtgggaccccgcgccgggcgcaagggcggcaacatcgtggccgccgggacgttcgacgacatcctccggtccgacaccatcaccgccgattacctgacgggacgccggcggatcgaaattcccgaaacgttgcgcaagggaacgggcgggcgcatcgtgatccgcggcgcgcggggcaacaacctcaagaacgtcacggcggaatttccgctgggcaagttcatctgcgtgacgggcgtcagcggttcgggcaagtcgacgctcgtcaacgaaaccctgcggccgattctcgccagagagctttaccgctccttcgaccagccgctggagtacgacggggcggagggcctcgaacatatcgacaaactggtcgttgtcgaccagtcgcccatcgggcgcactccgcggtcgaatcccgcgacctattcgaacgtcttttccgacatccgcaagctgttcgagatgacgcccgacgcccagatccgcggcttcaaggccgggcgtttctcgttcaacgtcaagggcggccgctgcgaggagtgccgcggggcgggcgtgcagaccatcgagatgaacttcctgcccgacgtctacgtgcgctgcaaggcgtgcggcggccaccgctacaaccgcgagacgctcgaagtgaagtacaagggcaaaaatatcgacgacgtgctgaacatgacggtcaacatggccgtggagtttttcgagaacatccccaatatctaccagaagctccgggccattcaggaggtgggcctcggctacctgacgctcgggcagccctgcacgacgctgtcgggcggcgagagccagcgcatcaagctctcgtccgagctttcgaagcgcgacacgggccgcacgctctacatcctggatgagcctacgacggggcttcatttcgaggacatccgtctgctgctggaggtgctgaacaagctcgtcgaccgcggcaatacggtcatcgtcatcgaacacaacctcgacgtcatcaaggtcgccgaccatattatagatataggtcccgagggcggggcggccggcggggagatcatcgtcgcgggcacgccgcacgaggtggcgcagtgcgagggcagctacacgggtcagttcctcaaaaaactggggttgtagcgtctccgtctgtccggcggggcgctctgccgtgaggctctgaaactcgtcccgagggagggcggcgtatgcaaacgccgacgcccgtgacggcaacggtgtccggaagcggaaagtggcccatgatcccgctttcggcacaaaacttgctttcatagccgtaacaaaccttatgtgctatgaaaaaaacagtcattatcgttgtgggcctgctgctctgtgcggcggccgttaccgtgatcggacagaaaaaagtgctgtcgcccaaggaagaacgccgcgaggtgcgcgagaaacgccgtgcggaacgtattgccaactacgagaagttcatggactcgctcgtgctgtcgcgcaacttccagttcaacccgacgaccttccagcgtcagcccgcaggtccgatgcgccagattatgaaccccgcgttcaacgtcggcatgtgggacggaacggcggacatcacgcttccctacatcaagggttacgtgccgccttactatgtgacgatcatcaattacaccgtttccgatttgcagggctatatcaccgagcagacgcacgaaggctggatggtgaccttctcgacctcgctgttctcggcgtcgacctacacgttcaccttcgaaatcttctcccgcacgggcggtgctacgctgacgatcaccaatccgtggtataaccccgtgcagtatacgggttcgatttcgcagctctattgacgtaaatccattttgccggacccatcccgggcagccgtatccgctgcgctgtccgtttgccgctccggcgatccccgaacccccgcctcaggcgggggcttttttcccgttcaatccgatgtccgacttatgaaacactccgttttttccacctgcggcgcactctctttcattgcctgcgccgccgtcgcgcagaccccgcagtatacgctcgaaacttccgccgcggacagcgtgccgcagacgacgatcgttcccgtgcagcaggccccggtgcaggtcgtggagcatacgaccgtctacgaggagcctgcggcggggatggaccgcgcccagcgcagggcttataaggcccgggtctacgccgcgaagatcgactcgctggtgcagtcgcgcgactatatgttcttccccaactcgatgcagcagctacccggcggaatgatccgttcgatctatgccgactacttctttttcggggtgttcgtcgaccatgtcgaggtgcacctgcctaccgaacggggcatcacccagtatgtcgagatgctgaatttcgattcgatgtcggtccgcgactaccgggcggcccgcgtgcagtggggctggtcggtctccttcaatatttcggacggcaacacgctctaccacgccgatttcgccgtctcgaccgccacgggcgaaacggtgctgacgctcctgacgcccgacgtcacgatgcgctacgtcggctggctgtggaacaagcgggtgaacgacccgcggtatcgcaggatggattagaaaatgaaggataaaacggcgccgaatcaattataggctccgttttatctgaaattactcggtactcatggccagcctcaaacctacataatccgaattgtaagattgtgcaggcctgtgtgatacgcgtgcggaattggaccaaatagcccaacatccgccccgtataacgcgcatagacccgctttgcggaccttgtggatttgtttgaggttcctcgggataatcgcccagccagtcactgcaatattcgtaaagattaccgcccatgtcatacaatcccagttcattgggtaataactgttttacataatgcgggctgtttccattgttacgtaactcccaataatcccacttgttttcattgagtatataggttccggcattgttgtaacaccaggccgccaggatcgaaatgtcgaagcccggataaatgtgtccctgggatcggttgcctccccgtgctgcatattcccattcggcatcggtcggtaaccggaattttaatcccgttgcttggttgagacgttcgataaaaggttgaatgtcgttccactccacgccttgaggcttatggtattcagaatagtcgcactctgtttccataactgcgctccaaagttcctttgtgacctctgtttctccgatataaaaggtattgagcgtcactttatgtacaggatattcggtgcgatccggtttccagccgctcgcctcctgttcacgggttgctcccatctggaatgttcctccatctacttttaccatggtaaaagaacagttcttaaatgtaatttcttttaccggaacattctgttcgtttttcgaatgtccttcgtcatcatctttgctgcatgcgaccagacagatcgccaagaacggcagcagaatacggttttgtttcattttgatagattggttaagggttaagagtcaataaaaaacgcggacaaattcctttatccacgtcggaggtattggacgacctacaagtaagatgaaagaaatgcccgcgccgtaaaacagcacgagcatcgcctttagtcccttacttgttagaaagtgtccaattttccgacgtaagaagaaaagccgatgcactttttatatgtcgtgtgcccgcaggcacggagttgaaaggttgttttctactgcttcataggcgtcgcggtttggtgtttgatcgtacaaatataagcaattctgaattctgaattgtaaattctgaattatttcctgtccgcaggacggtaaataagcgccacggcggagacggagatgccttcctcgcgcccctcgaagcccagatgctccgtggtcgtggccttgaccgacacccggtcgtcgtctacgcccattgcgccggccatcgcacggcgcatggcgtcgatgtgcggccgcaacctgggctgctgggcgcggatcgtgcagtccacgttcccgatctcgtagcccttttcgcgcagcagttccgccacgcggcgcagcaggatcttcgagtcgatgcccgcaaaatcggccgacgtgtcgggaaagtgcagcccgatgtcgcccagcgccgcggcgcccagcagggcgtcgcacagggcgtggatcgccacgtctccgtccgagtgggcgacgcaccctttcgtgtgggcgatctccacgcctcccagaaccagcggcaggctgtcggccagagcgtgtacgtcgtatccgtgtcctattctgaaatccattcgttcccgtattttatattgtcaaagttacggattttttcctaactttgcaaaaatgcaaaaatctatgtcggaaataacctctttggaaccgcgtcttgtctgggaacagttcgacgccatcacgcgtgtgccgcgtccttcgaagaaggagggcaaaatcattgattttctggtcgatttcgccaaaaagcaccatatcgaatataaaaaggacgccatcggcaacgtcgtgatgcgcaagcccgccacgccgggcatggaggagcgcgcagccgtgatcctccagtcgcacatggacatggtctgcgaaaagaactccgatgtggagttcgacttcgacaacgatcccatccgcacgcgtatcgacggcgagtgggtccgggccgaaggtacgacgctgggcgccgactgcggtatcggcatggccgccgcgctggccgtgatgctcgacgagacggtggagcacggtcccgtcgaagcgctgttcaccgtcgacgaggagacgggcctcacgggtgcgttcgagctgggcgaggggatgctcacgggcaaatacctcgtcaacctcgattcggaggacgagggcgaaatcttcatcggctgtgcgggcggcatcgacaccatcgccacgttccactacacgatggagccgtcgccgaagaactacacgttcttccgtgtcgacgtgtcggaccttcagggcggacactcgggcgacgacatcgacaagggccgcgtcaactcgaacaagaccgtggcgcgcctgctgtgggacggcatgcagtcgttcgaactcaaactgtgctatttcaacggcggcaacctccgcaatgccattccccgcgaggcttacgccatcttcggcgttccggcccgcttcaaggaggagttcgtcaagcgttacaaccttttcgccgcggacctcgaagccgaattccgcttccgcgaacccaatttcaaaatcacgctcaacgagatgccccacgtcgacgaggtgctcgacagcaggacgcagtcggcgctggtctactcgttggtgggcgttcccaacggggtcgtggccatgtcgttcgccgttccggggctggtcgagacctcgacgaacctcgcttcggtgaagttcgcggagggcaaccgcatcgttgtcacctcgtcgcagcggtcgtcggtcgagagcgccaagacctacgtgatgcagatggtcgagtcggtcttcgcgctggcgggcgccgatgtggcccattccgacggctatccgggctggatgcccgacccgcagtcgaagctgctggaggtcaccgtcgatgcctacagacggctgttcggctccgaacccaaggtccgcgccatccatgccgggctggagtgcggtctgttcctcgaaaagtatcccgatctggagatggtctccttcggtccgacgctccgcggtgtgcattcgcccgacgaacggctcgaaatcgccacggttcccaagttctggaaactgctgaccgaagtcctgaaaacaatctgattccgattccggcgtccccgctgcggggacgccggaatttgtcatgccccatccccgtctgacgctgcttctgccgtgtcgcgacggcttttctgtttgccggaccgttttgccgcgctgcatgcgatccggttttgaatcgtcggactttttgctatctttgtgttctgtaaagtcgcaaagatatgctgaaaagccgttgtgccctgttgtttctcctgtttccgtgtgcggcggcggcccagtaccccggcgacgaatactatccctatgccgaacgcgaggagcggcgcgaactgctcacgaccgattcgacgatcttctaccgcgccgtgcagtccccttcggacctctacggccttcgcaccggtttcaacctgccgcaggtcgcgctccggcgccgcggactggattacaccctggaacgcacgtcgctcatgggcgttgcggtttcctaccgttacctcgcggcgctgcgcctgctcggggccgaagaacagcgctatgcggggcttgccgccgcgcccggggagccggctgcggcgggcggcatgcgggcgttccggttttcggacggggagccgttgcagccttttctggcttcggtccgcttcaccgaccgcaattacctcgtgggagcgaaagccgccgtctcggcgtcgccgggcgacggctggcgcatttcggcggctctcgacgcccgctccggccgcgacatgcacgtcgaaggggtcttcaccaatgccgtgaccgccggactgcgccttgcccggcgtttcggcgaagggcacgaactctccgtgctgtgtatcgtgccgccctcggtgcggggcacgcgcctctcctcttcggaggaggctttcacgctcacgggcgaccgtctctacaacccggcgtggggctggcaggacggcagggtgcgcaactcccgcgtgcggcgcgagacggttccgctggccctggccgcctatgccgtgccgctgtcggcttcgacctcgcttgccgccacgcttgccgccgaggcgggcgtcgcgaagtacagcatgctcgactggtacgacgcccgcacgccgatgcccgacaattaccggtatctgcccagctatacgggcgaccgggagaccgagcaggcgtggctcgcccgcgatccgcgctacacgcagatcgactgggacgagctgatccgccagaaccgcatggcgggcggacatgcggtctatgcgttggaagaccgtgtcgaacggctctgcaacctcgctttcgacgcgtcgttcgccaccgaagccgacgcccggctgacgctccgctacggagtttcgctccgccgcgaaaacacccgttcctacaagcagatgcgcgatctgctgggcgccgggtacgttacggacatcgaccgcttcctgatcgacgacgacacgtacggcaatctgttgcagaatgacctgcggcatcccggacggacggtccgcgagggcgaccgcttcggctacgattatgcgctgacgctgcgcggggctgcgctccgcttgcaggccgattaccgctccgaccgtttccgggccgatctttcggtcgtgctggggagcgatgccgtcagccgccggggctattacgagaaggaactttttcccggcgggcagtcctacggcccttcgcgcgtcatgcggttcacgccctacacgctcaaggccgctgcgggctgggccttctccccgcgccgctatatcgaaatcgccgccgcggccgccgcccggacccctcgggccggggaccttttctttcagccgctctataacaaccgtacggtcgacaaccccgtgcccgaacgcatctacgccgccgaactcaactgccgcctgacgggacccgtcgtcgattttcaggcggcgttcttcgctgccatgacgctcgacggcatcgagacacggacgtattacgacgacatggcctcggtctactgcgacatggctgtgacgggcgttgggcgcatgtcctgcggcgcggaggccgcggccgacatccggctgtcctaccgctggctgctgtcgctggccgcttcggccggacgctacgaatacattcgcgatccgcgcgtcacggtgctctccgacgtggataactcggccgtcgacgtgcaggccgtgagccgtatgggcggctgcgagacgggcggcgccccgcagctgaccgctctggcggagatcgcctggttcggcccgaaagggtggggatgccgcgcttcggcaggatatgccgggcggcgttacgtcgaaccgatgcccctgcgccgcaccgaccgcatcgcgggtcagggcggtatcacacgggagtttttcgacgccttcacccggcaggagcggctgccggacgccttcacgctcgatgccgcgctgttcaagtcgttccggttcgaacgttcgcggctcaccgcgtcgctgatgctgcgcaacctgacgggcgaagccgatacggtctatggcggctacgagtcgctgcgcgtgcgccgcatccgcccgggcgacgacacgctctacgcgccccacgcctcgcgctgcacctatgcgtggccccgttcgttctatcttacaatctcttaccggttttgatccgcacgtaaaaaaacgtccggattttttggatttccgcgttaaattcgtattttggagaggcaaaaaccttaaaaacttccagatccatgattatcggtattccaaaagagatcaagaacaacgagaatcgcgttgctcttacccccgcaggcgcccgggagcttgtcaaacggggacacaaagtttatgtgcaggctacggccggtgtgaacagcggatttgccgatgatgcctacacggccgtcggggcggagatgcttccctcgatcgaggaggtctacgcccgggcggaaatgatcgtcaaggtcaaggaaccggtggctcccgagtacaaactcatccgcagggaccagctggttttcaccttcttccacttcgccagcagcgaacccctcacccgtgcgatggtcgacagcggggcggtctgctgtgcctatgagaccgtcgagcgcgccgaccgttcgctgccgctgctgatcccgatgtcggaggtcgcggggcgcatggccgcgcaggagggacgctatttcctcgaaaaaccccgcggcggcaagggcgtgctgctgggcggcgtgccgggcgtgaagcccgccaaggtcttcgtcatcggtgcgggcgttgtcggaacggctgcggcgcgcaccgctgccggaacgggagccgacgtgacgatctgcgacatttcgctccagcggctgacctatctggccgacgtgatgccccgcaacgtcaagacgctgatgtcttccgaatacaacatccgcgaggagctgaagcatgccgacctggtggtcggttcggtgctgattccgggagccaaggccccgaagctcgtcacgcgcgacatgctccgggagatggagccgggaacggtgatggtcgacgtggccatcgaccagggcggctgtttcgagacttcgcgccccaccacgcacgaggacccggtctattacgtcgacggcatcctgcactactgcgtggccaacattccgggcgccgtgccccgcacctcgaccctcgcgcttacgaacgcgacgcttccctacaccatccagcttgccgacaagggctggcggcgcgccgcacaggagaatcccgagctggcgctggggctgaacatcatcggcggcagggtggtctgcaaacccgtggccgacgcctgggggctgccttacgaaccgttggtgctgtaacctgccggggcggtaatccgcaggcgttgtaacctgccggcctgttttgcggcggcctccctgtccatccgggacggggaggccgccggtgtgtaattatccgactttttggacgatttgtttttgaaattattaaataattcatatatttgcaagagagcaaggcagttacgtcggtcattccggtttcattccggttggaatgcgtcgctaaaagcgtcgaatcttcaagtccggcgactgtttttgttacggatcgtaagcaatacagaaagtcagggtggcgtttgccgcacggaaagcgtggggcggcgtcattaagttttattcgataaagaggttagtatgagtgagagattgtacattttcgacaccacgctgcgcgacggtgagcaggtccccggttgtcagttgaacaccaccgaaaaaattgaagtcgccaagctgctcgaaagcctcggcgtagacgtcatcgaggcgggatttcccatctccagccccggtgatttcaactccgtgctggagatttccaaggccgtttccgagccgacgatctgcgcgctgacccgcgccgtgaagaaggacatcgacgttgcggccgatgcgctgcggctggccaggcgcaagcgtatccatacgggcatcggcgtttcgccgcagcatatctacgacaaactgcgttccacgcccgagaagatcgtcgaatctgccgtcgaggcggtgaaatatgccaaacgctacgtcgaggatgtggagttctatgccgaggacgccgggcgcgccgacgtcgagtacctcgcccgcgtggtcgaggcggtcatccgggccggcgcgacggtggtcaatatccccgacacgacgggctactgtcttccgaacgaatacggcgcgaagatcaaatacctcgtggacaacgttcccaacatcgaccgggcgatcatttcgacccactgccacaacgatctgggcatggctacggccaatacgctgagcggcatcctgaacggcgcacggcaggccgaggtcacgatcaacggcatcggcgaacgggccggcaacacctcgctcgaagaggtggtgatgacgctccgctgccacaaggacgtggccgtcgacacgaacatcaattcgcgcctgatcaccaaggcctcgcacctggtgtcgagcctgatgaacatgcccgtgcagcccaacaaggccatcgtgggccgcaacgccttcgcccattcgtcgggcatccatcaggacggcgtgctcaagcagcgtcagacctacgagatcatcgacccgcaggacatcgggctgaacgagtcggtcatcgccctcacggcccgcagcgggcgcgcggccctcgtgcaccggctcgaactgctgggctacgacctcacgcaggaggaattggacgccacgtacgagaaattcctcgccctggccgaccggaagaaggagattcacgactacgacctgttgtacctcgtgggcgacatcgaccgcatgaagcagcagtccatttcgttgaaattcatgcaggtgaccaccgggacgctggttccgacggctaccgtggtgctgaaattcggcgaccacgaacgcatgtccaccgccacgggcaacggtccggtcgacgcggcggtctcggccatcaagaaactgatcaacgagaaggtggtgcttgcggagttcctgatgcaggccatcacgcgcggttcgaacgacgtgggccgcgtgcatgtgcaggtcgagtgcggcagccgcacggtccacggattcggcgcgcacaccgacaccacgcgggcttcgatcgaggcgttcctcgacgcgctgcgcgcactcaacgtaaccgaaaaaatcgaggaggaggattgatatgggacgaacgcttctggacaagatatgggacgcgcacacggtgcgtgtcgaggacggcggccgctgcgtgctctacatcgaccggcagtatatccacgaggtgacgtcgcccgtggctttcgcggggatcgaacgccgcggcttcggcgtcgcgcgtccggcgcagatcacggccacggccgaccataacatcccgaccgtcgaccagcaccttccgatcggggagccggagtcgcggcggcaggtcgagacgctggccgagaactgcgcccgccacggcatcgagcacttcggcgtgggacaccccaggcagggcatcgtgcacatcatcggccccgagctgggattcacccagccgggcatgacgatcgtctgcggcgacagccacacttcgacccacggagctttgggcgccgtggcgttcggcgtggggacttcggaggtcgaaatggtcttcgccagccagtgcatcctccagaccaaaccccgcacgatgcgcattacggtcgacggcgcgctgcgtccgggcgtcgaggccaaggatgtcatcctctatatcatctcgaaactcaccgcttcgggcggcacgggccatttcatcgagtttgccggcagcacgatccgttcgctctcgatggagggccgcatgacggtctgcaacatgagcatcgagtgcggcgcgcgcggcggcatgatcgcccccgacgagaagaccttcgaatacctccggggccgcgaacgcgctccgcagggagccgcctacgacgaggctgtggcccgctggcgggaactttacagcgatcccgacgcggttttcgacagggagtaccgcttcgacgccgcggacatcgccccgatgatcacctacggaaccaatcccggaatggggatggccgtcgacgggacgattcccgccgacgccgatcccaaggcgttggagtacatgggtttcagacccggggagcggatgttgggcaaagcggtcgactacgtgttcgtcggcagttgcaccaacggccgcatcgaggacctgcgccgtttcgcccgtctggtcgaaggccgccgcaaggcggacaacatcaccgcatggatcgttcccggctcgaagggcgtcgaggccgccgcgcgggccgagggactggaccgcatcctcgccgcagcgggtttcgaactccgccagccgggctgttcggcgtgcctggcgatgaacgccgacaagattccggcgggtaaatacagcgtttcgacctcgaaccgcaatttcgagggccggcagggtcccggcgcccgtacgatgctgtcgggtgtggccgttgccgccgccgccgcggtgacgggcgtgatttccgatccgcgcgaagtgttcgatatgtaaaagattatcattatgtccatacccaaattcgtaaccttcacctcgggggccgttcccgtcgaggtggaaaacatagataccgaccagatcatcccggcgcgctttctgaaagccaccgaacgcaagggcttcggcgacaaccttttccgcgactggcgctacgacgccgcggggcagcggatcgcttcgttccctttgaacgatccccgctacgaggggcgaatcctcgtcgccgggcgcaatttcggctgcggaagttcgcgcgagcatgccgcctgggccatcgccgactacggtttccgcgtcgtggtgtcgagcttcttcgccgacatcttccgcaacaacgccctgaataacggcctgctgccgatccgtgtgagcgaggagtttctgaaagctgttttcggcgagatccggcgcgacccgaaggcgcagttcaccgtcgatctgggcaaccagacgctgaccatcgtgtcggacgggcgcagcgagggtttcgagatcgacgcctacaagaaacgctgtctcgaaaacggctacgacgacgtggactacctgcgcagtatcgccgaccggatcgaggccttcgaagccgcccgcaaatagcctgcgccgatgtttcccccggttgaaatcatggacaccacgctgcgcgacggcgagcagacctcgggcgtctccttcaacgcccgtgaaaaactctccatcgcccggctgttgctggaggaactgcacgtaagccgcatcgagatcgcctcggcgcgggtctcgcagggcgaacagcaggccgtgcgcgccatcgccgaatgggctgccgccaagggctatgccgaccgtgtggaagcgctgggattcatcgacggcggggtgtcgctcgactggctcgggaccgccggatgccgcgtggtcaacctgctggccaaaggttcgcggaaacattgcgaggggcagctgcgccgcacgcccgaacggcatctggaggatgtgcgcgccgagatccttgcggccgtcgaccgcgggatgaaggtgaacctctaccttgaggattggtccaacggcatgcgccgttcgcccgactacgtctacgcgatgctcgacggactggccgacgctcccgtcagccggttcatgtgccccgatacgctgggcgtcctcgacccctacgacaccgaacgtttctgccgcgacctggtggagcgttatccgtcgctgcatttcgatttccacgcccacaacgactacgacctcgccgtggccaacaccgccgccgccgtgcgtgcgggtttccacggcgttcacgtcaccgtgaacgggctgggtgagcgggccggcaacgcgccgctgtcgagcgcggtggccgtgctgcacgaccgcctgggccgcacgacggggatcgacgaaacgaagatcaaccgcgtcagccgcacggtcgagagctatacgggcatccgcattcccgccaaccgaccgatcgtcggcgcgagcgtcttcacgcagtgcgcgggcatccacgccgacggcgacagcaagaacaacctctacttcaacgaactgcttcccgagcgtttcgggcgcgtccgcgaatacgccctgggcaaaacctcgggcaaggccaatgtcttgaaaaacctcgaagcgctgggcatcgacctcgacgaggccgcgatgcgcaaggtgaccgaacgggtggtcgagttgagcgacaagaaggagcaggtgacggccgaggacctgccgtatatcatcgccgacgtgctgcgctacgacccggtcgacaccccggtccggattctcaattacagcctctcgctggcgcaggggatgcaccccgtcgcgacgctccggatcgagattcacggctgcgcgtacgagcggacctcggcgggcgacggccagtacgacgccttcatgcgtgccctgcggcaaatctaccgcgaacagctcgggcgcgagtttccgatgctgcgcgactataccgtttcgattccgcccggaggccgcaccgacgccttcgtgcagacgatcatcacctgggagatggacggccgcgagttcaagacccgcgggctggacgccgaccagacggaggctgccatcaaggcgactgtcaaaatgttgaatatcattgaaataaactataacgacaatggatgttaaaatcgctcttttagccggcgacggcatcggtcccgagatcgtcgccgaagccacgaaagtgttggaccgcgtggcggaaaaattcggacacaagatcgaataccgtcccgcattggtgggcgccgcggccatcgacgccgtgggcgacccctatcccgacgagacgcacgccgtctgtcttgcggcggacgccgtgctgttcggagccatcggggaccccaaatacgacaacgaccccacggcgaaggtgcggcccgagcaggggctgctgcggatgcgcaagtcgctggggctgttcgccaacctgcgccccgtggcgctgttcgacgccctggccgaccgttcgccgctccgggcggaggtggtccgcggcacggatttcatctgcgtgcgcgaactcacgggcggcatctacttcggccgtccgcagggccgcgacgaggagggcgcgcgcgccttcgacacctgcacctacacggtctcggagatcgaacgggtcctgcacgtggcgtttcggctggccgtgtcgcgccgccgcaaactgacggtcgtcgacaaggccaacgtgctggaaacctcgcgtctgtggcgtgaaacggcccagcgggtagcccgggagtatcccgaggtggcggtggactatatgttcgtggacaacgctgccatgcagatcatccgccaaccggcttatttcgatgtcatcgtcaccgaaaacatgttcggcgacatcctcaccgacgaggccagcgtcatcagcggttcgctgggcatgctctcctcggcgagcgtgggggccgaagtggcccttttcgagccgatccacggctcctatccgcaggccgcgggaaagaacatcgccaacccgatggccacgattctttcggccgcgatgcttctggagcacctgggtctcgatgccgagggcagggctgtgcggcgtgccgtcgatcgggcgctggccgaaggagtcgtcaccgaggaccttgcagcgccgggcgaaaaggcccgttcgacctccgaggtgggggattacgtcgcttcgcagatttaatcccgttattccgaattgccggcagaccgttttttcgcggtctgccttttttgggtgtcgtaacgacacttttatttttgttgcggcgttttaccgaactgcatgcgaatcaattttgttctcgtccgacttttatgtacctttgtcgcttcaagaacaatgaatgacatggcaggttccaatttcgtagattacgtaaagatattcgcccgctcggggcacggcggcggcggctcgacgcattttcgccgcgaaaaattcgtggctttcggcggtcccgacggcggtgacggcggcaagggcgggagcatcgtcctgcaaggcgacaagcagtactggacgctcatccacctcaaataccagcgtcaccagttcgccgaggacggcgagcacggctccggggcgcgctcctcgggcaaggacgcccgcgacatcgtgatcccggttccgctgggcacggtagccaagcgcgttttcgagaacgaggacgggactgcgaccaccgaaacggtgggcgaggtgacggccgacggcgagcggctcgtgctgctccggggcggccggggcggtctgggcaactggcatttcaagagcgccactaatcagacgccgcgctacgcccagccgggcgaggagggtgaggaaggcacgttcatcctcgaactgaaggtgctggccgacgtggggctggtgggcttccccaatgcgggcaagtctacgctgctctcggtcgtttcggccgcgaagcccaagatcgccgattacgccttcacgacgctggagccaaacctcggtatcgtcgaggtccgcgaccacaagtcgttcgtcatggccgacattccgggcatcatcgagggtgcgcacgagggccgcggtctcggaacccgtttcctgcgccatatcgagcgcaattcggtgctgttgttcctgattcccgccgacagcgacgacatccgccgcgactacgacgttctgctgggcgaactgacgcagtacaatcccgaactgctggacaaggagcgcctgctggccgtcaccaagtgcgacatgctcgacgaggacctgatcgccgagatgcgcggccacctgcccgaaggcgtgccgtcggtcttcatctcgtcggtctcggggctgaacatcccgcggctcaaggatatgctgtgggaggcgttgcagcggtaacccccgcccgcgttgtccgcgttgtccgcgccggacgtccggcggttgggcgtgttgctgcggaatgcgctgccgtgccggaaaactccgcttcgcggttggtgacgcgcagggtgtatttcccggcgaaatagtcgatgattccatacaaggagcctgtgccctggggcagaggctcctttgcgtagacgcaggtcgcggcggtccgcacggtgaaggttcggccccgggtgtcgacgatctcgcgctcggtggcgacggcgcggcccgtctccgggtcggtgtcgcaccaggttttcccggcgtcggcgaaacgcacgtcgtcgaaacggacgcgtgtgtcgatgtgccgggccgagacggcgtcgaacgtaaggagctgtgcggagggtgtctcgccgccgggcggttcggtgcggatgtaccgcgccagctcttcgcgcggaatgcaccctgcgccgccgtcgccgggtgtcgttcccagctggattttcccgccgtagtcgcacagcgtaaggccgttgcagcgtacggtcgccacgatgccgaacggatagaggtctgccagcggggagccttccgcggcgatcgagatgccgcccgaggcgtcttcgacgacgatcgtcctgtgaaattcgccgtagaggtcattggccgtgacgaatccgcggatggtgatgtcctgcgctatcgcgacgctgctcttcccgtcgcagagcgatttgaggtaggcgaccgaattctgcggctccggaggacggaccgtgaattcgggctgcgtggcccggtcgcatccggccggcagcgtcagcaggaccggcagcgtcagcaggctaatgcgtgcagtcgttctcatcgcgcagtttgaggatgtaacgcccgtcgcccgcggcgtcgtactggagaatgcccgtcagcgagaccgtgccggcaggcacttcggcgtcggcgaaacgggcgtatcggcggacgtaggtgtagacggcgttgccgtcggcgtcggtgaagcgtttgtagcccgcccaggttgccgccgaaaggtcttcgggggtgtagcgcacgccgtcgatgcggacgagcgtgccgcagcggctttccgtaagcgcgggaatggcaagcggggcaggggagggcgcagccagggcttcgccgctgcggaccagcacggagccgagcgccgcccgggagccgatgtagtccgttgcgtagccgcttccggcggcgggcggacgtcccgcctgcaacaccccgcggctttcggcgatggcgagtccccggagcgaaagcgttacgcggcttcctatggggaagccgttgtgcagatggtcgataccggccatcacttcaagtcccgcttcagcgtcgcagatgcagagcgtgcggtagaaattctccgcgcggtcgcaactcgcgaccctccccgtgacgacgatgtcgcccgtaacggtgaagggcgtgcccgcatagcggtcgcgcagcgcggcgatggtctccgtcgcgggtttcccctcgccgtcgtcgtccggttccccgaaccgggagtcgtagcacccggtcagcaggagcgcggcgacggcgccgaaaaaaggtatgggacggaagtgaaacatatttttacgcaatgcggtgattcatacggaccccggccggtttgccgttaagcccttccccgggagaggggcggaccggtgaacgacgccggaggcggcgataacgaccggaccgaagcgggatgcggcgtgtcgcgcggaagcgtatccagcaatgttattgttcgatacgcgaatctttcagtcccaggaagtagaggatgccgtccagcccgatggtcgagatcgactgtcgggccgtggcctttaccttgggtttggcgtggaaggcgatgcccaggcccgcgaggttgagcatcggcaggtcgttggcgccgtcgccgacggccaccgactgggcgatgttgatctcctcgaactggcacagcagccgcagcagttcagccttgcggcgtccgtcgaccacctcgccgacatagcgtcccgtgaggcgtccgtcctcgatctccaattcgttggcgtagacatagtcgaagccgtatttctgccggaggtagttgccgaaataggtgaatccgccggagaggatcgccgttttgtaacccacgcgtttgagaatggtcatcatgcgctccagcccctcggtgatcggcaggctgcgggcgatctcctccatgaccgagacgtccagtcccttgagcagcgcgaccctctgcgaaaagctttcgcggaaatcaatctcgccgcgcatggcgctggccgtgatttcgcgcaccttgtcacccacgcccgcgcgctcggccagttcgtcgatcacctcggtctcgatcagcgtcgagtccatgtcgaagcagatcaggcggcggctgcggcggtagatgtcgtccttctggaacgagacgtcgagaccgatctccgagaggttcataaatccctcctgcatcgtgctgcgttcctggtcggtgagcgatccgcgcaccgagagctcgatgcacgacttggcggcgcggtcgtcctcgcagaggggcatgcggcccgtgaggcgtttgatggcgtcgatgttcagcccgtgctcggccacgaccttcgtcacctcggcgatgtggcgtgccgtgacggtgcggcccagcagggtgatgatgtagcggtttttgccctgacggcccacccagtcgttgtagcgttcctcggagatgggcgtgaaacggatcatcacgcccagttccgacgccttgaacaacagctccttcataatgcttcccgacttgtcggccgtggtcttgatcaggatgccgagcgtcagcgactggtggatgttggcctgtccgatgtcgaggatgaaggcgtcgtagcgtgcgaggatctcggtgagcgacgaggtcatgcccggtttgtcttcacccgaaatgttgatctggataatttcaacgttgttctgcatcgtataatgtatggtgttttccggcgctttctgcaaaaagcgcagacaaagttaataaagttctcttttttttggctatttttgcctcacaaacttaaaaaacggaattatgtggacatttttagcggccgaagaacctgcctcgctgatcgtgccggacagtgtgcagaaagcgaatctggccgaagcggtcaataagatcgtgaacatggatttcagcactttgttcggctcgctgattcgtgaatcgctctggattcttgtcaaggttctcattgcgctagccatctatttcatcggacgctggctcgtgcgccgcttcctgcggctgatcgacgtggccatgcagcaccgcaatgtcgacatttcgctgcgttcgttcacgcgtaataccgtcagcgcgttcttcacgctgctgctcatcctgatcgtcgtgtcgacgctgggcgtcaacgtgacatcgctcatcgccgtcgcgtcggccgccacgctggccatcggtatggctttgagcggcacggcccagaactttgccggcggggtgatgatcctgctgatgaaaccctaccgcatcggcgactacatctcggcgcagggacagtcgggaaccgtgcgcgacatcaagctcttctcgacggtgatcgccacggccgacaaccagacgatctacattcccaacaactcgatcgcgacggccatcatcgacaactattccacctccgagacgcgccgcgtggactggaccgtgggcatctcctacggcgacgacgtggatgtggcccgcaaggccgtcctttcgatgctggccgccgatccgcgcgtcctgcccgatcccgccccggtggtgtgggtcgctgcgctggccgacagttcggtgaacctctcgatccgcgcatgggtcaagaacgctgactactggaacgtctttttcgagcataacgagcagttctacaaggagctgccgaaggccggcatcaacttcccgttcccgcagatggacgtgcacctgaccaaagagtagggtatgaaaacgcaccttttcaccgttcttgcggcaatgagcctttcggcctgcaatcctgaccggggacccgagtatacgaccccggcggaattcggcgaggtgaccgtgtcgccgcagaccatggccttcgattcggaggtccgggtgaaggtgtccgtttcgtgcccctacgggctgcgcaacgtctgcattctctacatgctcgacggcgacgaatccgacgtgaggaccgtcgcgaagaccgagccgccagccgacgtcacctcgttcgattacgagggagtcattccccggcagagagccggccggaaagtgactttccggatacgtgccatcacggcatacaatgtgccctcctatacgcagcttcgggaatatacggttcccgacgaagaggaggaagaatccgaacaacccatttaaacaacgaaatagcaattttatggaactgaaagagattctggccatttcgggccagcccggactttataaattcgtggcgcagtccgtgcgcggcgtgatcgtcgagtcgctgctcgacggacggcgcatgaatgcctcggcgaatgccaaggtgagcgccctttcggagatttcgatgttcaccgaaggcgaggacattgcgctggccgacgttttcacccggatctacgcccacacgggcggcaaggaggcgatcagccccaaggagtcgcccgagaagctgaaagccgcgtttgccgaggtgcttcccgagtacgaccgcgaccgggtgcatgtttcggacatcaagaagtgtttcgcgtggtacaacacgctggtcggggcgggattcacggagttcaaacttccggccgagaacgaatagcgaaaaatatcccggcccgtgccgggacgaaccgaaagccgctgcggctttcataaagacctgtcgttatggagaggaaaacgaaagtgctggcactggttgcccacgacaacatgaaacgcgacctggcggagtgggtcgactggaacagccgcaagttgagccgccaccatttggtatgtacgggtacgaccggcaagatggtcgaaaagaccctgcgcgaccaccgggaggagcacgaggacgagacggaggagaaacccgagctgaaaatcacgctgctcaagtcgggtccgctgggcggcgaccagcagctggggtcgctcatcgccgacggaaagatcaatgcgctgattttcttctgggacccgatgtcggcccagccgcacgacgtcgacgtgaaggcgctgctgcgtctggcgacgctttacaacgtcccgacggccatcaaccgttcgtcggccgatttcctgatctcctcgccgctgtacgaggacgacggctacgaacccgtcgtgaaggattacaaggcctatgtcgagcgggtgctgaaataggcgatggattgaaaagggaacgggcgtgaatttcacgcccgttccctttttcgttattaagtgtacgcagaggttgtttttgcaggaatccggagcgtttactccatgtccagcggcatggattcgatgaccgctttgttggcggccttgagccgttcgggaagcaccttcatcaccttgcggtcgtaggtgaacagaccgttcacttcgccctccacgtcggtggtctgggtgtagacggcgcccgagaagcccagacgcacgtatttgatcaggcttttggcgtatttctcatactctgccgtcacctcctccggggtcttgaactgcacgtagccccagttgcgcttgttccaccagaggtgtccctccatgggcagcccgatgccgccgtattcgcccagcacgttcacgcgctgcggatcgaagagtttcatggcgggacccgggtagttgtgcaggtcgagcatgtggccgcagggacggtggttgccgccgctggcggggttgaccagacgcgagggatcgtactccatggtccagttcacgatgcgctcggtgtcgaactggccccatgcctcgttgaagggaacccataccacgacgctcggggaagacatgcataaatccatgatctccttccactctttgctgaagttgtccttcgactcctgcgtgcggttcttgtccgtaccgccgttgtaggtgtgcatttcccacttgttgcccatgtctcccgagggcatgtcctgccatacgagaatgccttcgcggtcgcagtggtagtaccagcgcgccggctcgaccttcacgtgcttgcggatcatgttgtaacccagctccttggtcttcagaatgtcgaacagcagcgcttcgtcggtcggtgcggtgaaaagtccgtcgggccaccaaccctggtcgagcggaccgaagtggaagagcggtttgtcgttgagcgtcatgcggaggatgccgcccttgtcgcgcttggttccgatcttgcgcatggcggtgtacgaatcgaccttgtcgacggttttcccgccctgcctgagcgacacttccatgtcgtagaggaacggcgagtcggggctccagagtttcggctcggcgatgcccagacgcagcgggtttccgggaagtcccgtcgccgaagccacgagcttgcccttgtcgaggatcttcacctccaccagatcgcccgtcgtgcagttttcggccgccacggttacggcgatgttcttctggtccaggttgggaatggccttgatgcccgagatgtggctcttcgccaccggttcgatccacacggtctgccagatgccgctgaccggcgtgtaccagatgccgttggggttcagcacttgctttccgcggggctggtatcccttgtccgtgccgtcgaacacgcgtacgaccagcttctgctcgcctttggccttgagatagggggtgatgtcgagcgaaaagggcgtgaagccgcccgtgtgcgagcctgcaaggatgtcgttcacgaatacgtcggctttccagtccaccgcgccgaagttcagcagcacgttgctgcctttccaggcggcgggcacgctgaacgtgcggcggtaccagagttcatccttctcggtgaggcccttctgcacgcccgacagcgaggattcgacagcgaaggggacgaggatctttccgtccatcgttttcggttccatggcgccgacgggtttgatggcatagtcccacaggccgttgagattcacccactgcgagcgtaccatctgcggacgcgggtattcgggaagcacgttggccgggtcgaccttttcggcccatggcgtcttgattttgtcgcccacgggtttccactgggcaaaggtgcacagcatgctcagcgctgccacggttgtcagaattgtttttttcattactgattgataaaaggattgaatatagtgtttactgtctcttcttcttgaactgtccggggtaaggctctaccatgcagcgctttgcccaggcttcatacgctttggccatcgcttcgacctttgcgggggcctgctccggattttcgagcacgtatatctgatggttgcccgtattgccgtcgtcggcgctcaaatagatataccatcaggttcgcgatccggcgcagcgacatggcgtttacgggagctttcatggttgggttggttttaagatcctgatttacgaatacaaatttcgtaaattaaaattttttacctgccatattttgatcagaaaaaagcaagatttagtcaaaatgccccgcaggggtccggttggcgaaaaattgtcgtcgattggtcaaatattggtgccccggaacggctgatgtatttatatttgtatgccaatcgaaatcgtgcattattttatgctattcttcaaacgcccggctttcggccgaatctacgccttcgaggtggacggctacgggaaccgcaccggcctgctcaacagcattacggtcgagtagggaccggtatgattccgatgaaaaagcggggccgcacacattgcggccccgctttttcacaggttgtgcgacagcggtgccggaaccgcttcgctcaaatcgtagccgccccagcggcaggcgatctcgtcgagcgtggcgaacagctcggcggtgtcgagcgatgtcacgagtttcagccgtgtggacttgaagtcgggcagccccttgaaatagttggtcatgtgacgccgcatttcgaggattccgacatggtcacccttgatttcgagcgatttctgtaaatgttccttcgcgatggccacgcgttccgcgaccgacggctgcggcagcgcttcgcccgtcgagaggtagtgcttcacttcgcggaatatccacggccggccgtaggtcgcccggccgatcatcacgccgtccacgccgtagcggtcgaacatctcgcgggctttcggacctgaatcgacgtcgccgttgccgatgatcggaatgcgtatctgcgggttgttcttcaccttgccgatcagcgtccagtcggcctcgccgcggtacatctgcgcccgcgtgcgcccgtgaatggtgagggccgcaatgccgacatcctgcaaccgcagggctatctcttcgatgtttttcgactcctcgtcccatccgaggcgggttttcaccgtcacgggcttcttcaccgccgcgacgatccggcgcgtcatctcgaccatcagcggcacgtcgcgcatcatccccgacccggctccgcggccggcgatcttcttcaccgggcagccgaaattgatgtcgatcacgtcgggaccggccgcctcggccatgcgcgccgcctcgaccatcgggtcgatcaggtggccgtatatctgaatgcccacggggcgttccgtgtcgtcgatttcgagtttcttgagcgatttcgccgcgtcgcggatcagcccgtccgacgagatgaactcggtgtagaccatgtcggcgccgaagcgtttgcacatgtagcggaacgacgggtcggtcacgtcctccatcggagcgagcagcagggcgcgttcgcccagttctatatttgctattttcatggctgttgtttctggctgacgaggattttgtcgatgcgcgcgccgtccatgtccacgatttcgaacgtgaagccgttccattccagtttctcgcccgtggcgggaatgtgggccagttggtcgaggatcaggccgctgacggtgttgtaggcgttgcagggcagggcgttttccagaccgaaccagtcgagaaagtcgtagaaagggcattgcccgtcgaccagacagctgccgtcttcgcgccggacgatgtccggttcctcgcgcgggtcgggcagttcgccgaccagggcttcgaaaatgtcgcgcagggtgatgatgccgcgcgtcacgccgaattcgtcgcagatgatgccgtagcccagctgctccgtgcgcagctgttcgagggcgttgtagacctcgaacccttcgtggaagaatttcgccggagcgaccagcctgcgcaggtcgaatccctcgtcgcccaggtgcaggaagaggtctttgaggcagaccacgcccagcagtttgtcgagacttccctcgccgacggggtagcggttgtggggcgctcgggccaccgtctcgcggatctgcgctgcggacgccgccgcgtcgatccatgccagttcgctgcggtgggtcatgatcgactccacggtgcggtcgcccagcgagaagacgcggcccatgatctgctgttcgaccgcctgcacctcgccgtcctcggcgccttcctggatgatcgaacggatttccgcctcggtgaccttgctctcggcccgttgcaggcctagcaggcgggcgacgcccgccgtgcttctggagagcagccacacgaagggcgacgccgcgaccgaaagcagccgcatcggctgcgcaacgatttttgcggcccgctcggcggcgttcatgccgatgcgtttgggaaccagttcgccgaagatgatcgtgaggtaggtgaccgcgatgacgatagtgacctgcgccgtgacggtcgccgtgcgcagcggaatgcccagtcgggccagctctccgccgaatttcgccgccagcgtgtcgccggagtaaatacccgtgagaatgccgatcagggtgatgccgatctgtacggtcgagaggaaccggtcggggtctttggccagtttcagggcctggcgggcgcctgcgctgccttgccgggcctgcatctccagattcgagcggcgggccgatatgagcgcgatctccgacatggcgaacagcccgttgagcaggatcagcagcagaatgacgagaatttccatggaatgtcttgtcggtttgtgtcgcaaagataatggatgtcgggctaaaaccaaagaatatggtcccgggggaattgcttattcgctgaaaaacgctaaatttgcaggcaaaatctattggatatgaatatcgaaacctttatttcggatgcggtccgccggtcggtggaggcgctttacggtgagcttggcgacgagcagttgcagattcagaagacccgcagggagttcgagggcgactataccctcgtaacctttccgctgctccggcgaagccgcaagtcgcccgaagccaccgcgaccgaaatcggcgaatacatggcggccaacgtccccgagatcgcgtcgttcaacgtgatcaaaggtttcctcaacctttcgctcgacagtgcgttctgggcggcccgcttcgccgaggtcgccgccgacgaacgtttcgggcaggctcccgcgacgggccgtaccgtgatggtcgagtattcgtcgcccaacaccaacaagccgctccatctggggcatatccgcaacaacctgctgggttactccgtggcgcagattctcaaggccaacggccatacggtcatcaaggccaatctggtgaacgaccgcggcatccacatctgcaagtcgatgctggcgtggaagctctacggaaacggcgaaaccccggcatcgtcggggatgaagggcgatcacctcgtgggcaagtactacgtggagttcgacaaacactacaaggcgcagatcagggagctggtcgcgcagggacagccggaggacgaggccaagaaaaacgccccgatcatgctccaggcgcaggagatgctgcgcaagtgggaggcccgggaccccgaggtgtactcgctctgggagacgatgaacggctgggtttacgagggcttcgacgtgacctacaaggcgttgggcgtcgatttcgacaaggtctattacgagtcgcagacctacctgctgggcaagtcgctcgtcgaggaggggcttaaaaagggtgtcttctaccgccgttccgacaattcggtgtggatcgacctcacggccgacggactggacgagaaactgctgctgcgcggcgacggcacgtcggtctacatgacgcaggacctcggcacggctttccgccgcttcgaggacaataggctcgacgacatgatctacgtcgtgggcaacgagcagaactaccacttccaggtgctgaaactggtgctcaagaaactgggctacgccgactggagcgatcatatcacccacctctcctacggcatggtggagcttcccgagggcaagatgaagtcgcgcgagggtacggtggtcgacgccgacgacctgatcgaaggcatggtctcgacggcccgcgagatgtcggccgagctgggcaagctcgacggatgctcggaggaggaggccaatgccgtttcgacgatggtcgggctgggtgcgctcaagtactttatattaaaggtcgatcccaagaaaacgatgctgttcgatccccgcgagtcgatcgacttcaacggcaatacgggtcctttcatccagtacacccatgcgcgcatccgctcggtgcttcgcaaggccgccgaggcgggcatcgacttcggaggagccgccacggcggattacctgcgcgaggagatcgacctggtgaagtcgctgacggagtatccgtcggtggtgaagtccgcgggcgagaacttcgcgccgtcggtcgtcggggcctatgtctacgagctggccaagcagttcaatggctattaccacgaccattcgatcctcaaggaggagaacgccggggtgcgcacgatgcgtctccagctggcgcagcaggtcgcccgcgtcatcaaggagggcatgaaactgctgggcatcgacgtccccgaacgcatgtaacgcattctgtgataatgaaaaacggaggtttcgccgaaacctccgttttttcgtgccgttagcgtggtacgaatcttgcgagagacgaggacgttaactaacactattttagcgtgaaaacatttgcatcaactttcgctctttctctcgcgttgtgtgccgctgccggagcgacggcccaaaccaagagtgcggttccggctcctgcggccgataccgtattgctgtcggagactgccgacggagactacatcgttcgcaggttcatcgtcaaaagccgcggcgacgccgactattcgattcgctaccagatcaatctggcgacgctcaatgccgcgctcaacggcaatccgcaggagctggacggactcaacgcctttgtggacaaccttgtgaaggatacgctccggcaggtctgcgccgtgacgatcacgggctattcttctcccgacggtccgctgaagttcaacgaagcgctggctgccaagcgggccggcgatttcaaggcgtatgtcgacaggaagtacgatttctcgaaaaagtacaaggtgacggtgaattccgtcgccgaggattgggagacgtgccgcgcgctggtcgcgcagtcgtcgatgcccgaccggcagtccgtgctgaacgtcatcgacggcaagcagtcgtccgatcagaaagaattggcgctcaagaagatgccggctgcgtggagctacctgaaaaagaacgttctgccgaaactgcgccgtgtcgaactgacgatcggctacggtgcgggcagcatcgtcgagcagcgcaccatgatccccaaacccaaaccggctccgcagccgcagcccgcgcaacccgctgaaccgtatgtcgttgtcgacgagcaggtgaacggaatcatcgtcgagatgcccgacaggcacgaatacaagaaggaggtgcgcgaggagtcccgggaggtgaagaaggaggcgagggccgccgagcggctcgccaaaaaagaggcccgcgaagcgcagaagatagtccgccagcaggagaaggctgccaaaaagatcgctaaaaaggaggccaaggccgccaagaaagccgagaaggccgccaaaaagacctacaaggagctcgaaaaaatgtaatgaaaaaggattccggatttccggaatctttttttgtccgccgcccgcccgggaaataattcccggggccgcagtccgaaaatgtttgataatccgaaacgttttattacctttgtcagagcaaaaattttaaaatcgactgaatatggcaaatttacgaaacctgaagaaggagattgactaccgccttgaggaggttgttttcgactgcgatatggctatctgttttcagccttcgaaagagaaggagattttcgaggtgatgcaggaggccgtcggcgttcgcaacgatctgttcgccaaagcgatgaatcccgccgagccgcacaatccgtcgctcgtccgcaagcactacgctgccctgcgcgccgagatggacgacgttttcggcaaacttttcgaaaagttgagcaagatcaacgagcagaaatagggtagtccctttcgctgaaaaacaacggagcgcctcatgcggggcgctccgttcgttttattcgtggtcgcggcagcagtcgccggggtggtgttccagcacggtgtgggggatgtgcccgtgcgataccagttgaatcgggcagtcgtagttgcgcaactgttcctcggtcagaatgttcgaacggtggcggtggacctgccggttgacgcagacgatctccttcacgacgctggtgatcgtgccgatgtcgtgcgacaccatgacgatcgccatgcgggcgttcagttcatgcagcgtgcggtaaagctccttctcgaatttgttgtccacgaaattcgcgggttcgtccaggatcagcagcttcgggtccgagatcacggcccgggccagcagcgcccgctgcatctgcccgcccgacacctcgccgatggggctgcgggccgtgtcggcgattcccgatgccgcaagcagttccatcgctctggcacggtcctccttcgtgtagcgggagctgaatccgcggcggccctgcaatcccgacagtacgacctcgaggaccgagatcgggaatgcgcggtcgaaatccgaaatctgcggcatgtagccgatcagccgttccttcccgcggaacagctccggggcgagagtcagctctccggtgtgggggacggttcccaggatggcctttacgagcgtcgtttttccgccgccgttgggacctatgacccccaggaaatcgaggtccgcaatctccaggtcgacgtgccggagggcctcgtagccgtcgtatgcgacacttacgtcgcgcagcgttaccagattcattttgccgtgattgaatcggtcattgcgtcgatggcgccgatggcgtcttcgtccagcgggtcgatctccacgtattcggcgtcgatgtcgcgggcgatgatctccacggtcgatgccgggaactggttctggtagaaaatccgccgcacgccgtcctcgcgggcctgtcggataaccgccgtcagctgtttggccgacggttccttgccgtcggcctcgatggccacctgccgcagtccgtaatcgcgtgcgtagtaggtgagtgcgggatggtagacgatgaagtacttcacgccgctccgggcgatcttctccgccgtgcggatgtccagttccttgagcgtgctgcgcagccggttgtagccggcctcgtatttcaccgagtcgggataggcgttgcgaattgcctcgtaggcgtttgcggccatcgtttgcagggctttgggcgaggtccagacgtgggggtctacaccgtgggcatgcccgtggtcgtgtccgtggtggccgtgcgagcaggagcctgcgatcaggtcgataccgcggctcaagttcacgactttcgcctgatccccgactttgcccagcagggtggtttcgaagtcgatcaatcccacgttgaaaatgagctgtgccttgttcagctccacgaactgccggggcgtcggctcgaacgtctcgggacttgctccgggcggcacgagcacctcgattttgaaatcgtcgccgacaatcccctccacgatgctgcgcagcggggggatcgagacgtaaaacgtattctccccggcgggttgttccggcgtgcaggccgcgagcagcagggctgccagtaagtatgccgataatttacgcatggttgacaatcaatgatttgtgatttatacggtagggtagtcccctgtattttgtgcaaaggtagtaaaattacccgtagcggcgggattttgcggcttgttttgtcgtttcggccgaaatgtttatctttggcccccgattaaaatccccgtatgccgataaacaatccgaaagaggtcctcgccctggtggagagggccgcctccgacaagatttcgcttcccgttcgcaaaatattgattttagcgtttttagctggcgcctatatttctatgggaggcttgttttccatcgtgataggatatggctttccgtcgatggctcctgctccgggattgcagcgcctgctctccggacttgtcttcccgctggggcttatgctggtcgttttcgcaggagcggaactctttacgggcaataatgccgtgctgatccccggtgcattgggacgacgttatggatggcgtaaggtgttgttaaattggatgttggtctatgccggaaattttgtcgggtcgctgtttttcgcctgttttctcgtgaaacttcccggcatgctctctgccgaggcgtggcgttcggcggccgtcggcattgccgaggcaaaggtctcgatgccgtggctcacggtgttcctgcggggtgtcggcgccaactggctggtgtgcctggccgtgtggctgggtttgagcgccaacgatgtcgcgggccggctgctgggattgtttttcccgataatgtgttttgtggcaatcggttatgaacacagcgtcgccaatatgtttttcattccgctgggcatgatgcacggtgcatcggtcaccgtgtccgattttctgcttgccaatcttgttcccgcgactttgggcaatatcgccggcggagcggtctttgtcggcggtatctactggtatattaataagtaaaaaacggttgattattaatcaattaatattcgggtaacgaccataatttaacataatgaatatattaattcaattacctttgtactgtaaggatgctttttttatggtcgccggtcggacgattggccggcgggttaaattcattttggattttaagcttcggccggcggcggattatcttcctgtgcgtgcaacattcacaaaaatattccgggcgatggcttttagcgctttgtcggcgtgaaactctcgaaggtaaggtcatcgtacaatattacgatccgccggacagcgacgtctgttcgtgtgccggaaaatggagtcgttgccggcggcgccggattttcggacgttgtcgaagccggctcctgatgcggcgggttgaacggcgtattccgggtcggaccgaacaatccgtcggagatcgacgattcgaccgcagcggccggtgcggattgttcgggttcgctgtcgcgatacatcttgtcggaatcgagcagcagccagtcgggattgattcgcgggaacctccggagaatcttttgtaacaaatcgaagcccggtttgtttcgcccggcgagaatatgggaaattcccgccggattgatttcgagcagttccgcgagctggctcggcttcaatccttcgtttttcatcagatcgagcaatttttccctcatcagcgcaaatttttacaaatataaagttttttcttttgtaaaacaagtaaaatctacatttgtaaaatgttaataagtgtcgacaaagtttacaagtgtaaataagtcgatatggttaaatttgcatgcaatctatttgttaaagcgttattttagataaataacagtaaatatatgatattattgtatttacgtcgtatattgttggtgttgtctgcatgtagctggttattgatgaattagaccgtatgatattaaatcgtttctttaagtaatatttgtaaatagctgattgatggatatatattgctcgatgtttaatattttgatcgcttgttggtcgctctggaattgcagtttattcaaaggatgccggattattacaattgtaactattgacatctttaacaaacagatgtggtttacaaatgtaattacatatggaaatgacgcggacattatgtgtttacatttgtaaatacactaccctattttgtaaaaatgaatgcattttcaagctatttccgaacccttatcagacattttgttaacatctccggatttcggatttattatgttaaataaaaagaggccggatagtgttgataatccactatccggcttaaatacagcttgttgtagatttgtaaacagccttctatttcgagagtttgtcggctatttcgcggaactcttccggcgtcagtttgagcttttcgcggtggaaatccacgtcgttttcgctctgaatggggatcagatgaatgtgtgcatggggcacttcgaggcctaaaacgacgactgctacccttgcacacgctatttcccgcttgattttggctgcgacctctttggcgaaaagcatcatgcctgccagcgttcggtcatcgaggtcgaaaatgtagtccacctcctttttggggacgaccagcgtatggccttttgtcagcggattgatgtcgagaaatgcgtagtagtcttcgttttcggctactttgtacgaggggatctcccctgcgatgatgcgtgaaaaaatagttgccatatctttgtttttaggttttgcctatttagcgaccggggcgtcttccgaagtttcggctgcatttttttctgcggcgattcgtttattgcggatcagttccttgatgctgttaaatacattgacaagaatcattatcagcagcaggctgtcggtgaatgtgaacttgtccggttctgcgaaaagcccgaaaatcgcccatgtcgtgaataacgcaccccagaaccaaagcgccctgcgctgcattcggaccgttttcgcggcttcccgccggcggtattcttccagccatttattttcccgaggtgtcattttcgtcatttatcgaggtttctgctgtggagagagtgggtcagagatcgccccagggcctcttgcccaccaaaatacgcctgttattgacaatgccgagaaggatgctgacgagggagagggcgatccccaacgctcccaaccagtccgaccgggagatgacatcggtacggaataagtagattccccatccgatacttgcggcgattgcgcatctgagcaggatgtattgcagtttcagattgcgttttgccttgtccgggtcccgggcggcggcccgccaacgcagttcttcgggcgtcaagggggctttaggcttggtttcaggcatcctattcctcgaacttgggtttcagtatttccgagtagataatcgcctgccggaggttgaattcttcggtctgggacgtcgttgccgcatccggtgcattgttcgtgagggaatgcgcggcgatttcgtcattcccgctgtcgtccatgagccggttgacggtctgatggcgtaaatgccccctcccggcggctttcggcgtcgtatgttccggtgcgtattcctcggcgggaatctcctccagactctggcattcgtccggaaaaacgggtgcaacgggccacggcgcagggcgtggagcaggcatcggagccggttcggactccgggtgtgcctgcgagggccacgcctcttcgtggccgggtgtgcgggcgccttttccgcgggccttgcgcgattgcgatacgacgttgaatatcatcgctccggcgatgatcacgacccatattaccgttgcgaaatcatccatgtctttaactcaatgttcgtttgacactctctataccctttatcttgcgcagtttgtccatcacggcgtggagactttcggcgtccttcacgtagaggctgacgttgccttcgaaaatgccgtcgtggctgtggatgttcacttcgcggatattgatgttgaaatcggcgcttacgaccttcgccaggtcgagcaggatgccctgccggtcgatgccgcgcagttccgtggtcaccaggtaggacatggccttgtgctgcgaccatttgatctcctccttgacgatgttgcggccgaactgtgtcgcaagacggttcagctcgtcgcacgtggccttgtgtacgatgatgtttcccgaggcggggtctcgataccctaccaccttgtcgcccggaatgggcttgcagcactccgcgatttcgaactgcggttccgtggccggagcctcctctgccggggcgatttcgcccggaattgcggcatcgtccgtctcgtcctccttcttctgggggatgaagagggtccagaatttgagtatcttgctcttggagttgaccttgagggctttgtccaggttgtcgagcgagacgattcccgctccgatcttactgtacagctcctccttgttcttgctgtcgtaaatgggcgtgatcttgcgcagtacgcggccgctcaacttgacgttcagcgacttcatcttttcgtcgagcatctgcatgccccgctcgatgttgttctgccgttcgcgtttgaggaaactcttgatcgactgtttggccttggctgtggtgaccgtttcgagccattcgggcttggggcgggcgttgtcggccgtgatgatctcgatctggtcgccgctgttgatctgcgtggtgatcggttcgagtttgtggttgatcttggcgctgatggcgctgtttccgatcttcgagtggatgtcgtaggcgaagtcgagggccgtggctccgaacggcattttccgggcttcgcccttaggggtaaataccactatttccgacgtatacagcgataacttaaagttgtccaggaagtccacggcgttctccgtcggactgttcagcgccgcgcgtatctgtttcagccacttgtcgaattcgtcctcgtcctgcgaaatggtcgcatgcttgtatttccagtgggcggcgaatccgcgttcggcgatgtcctccatgcgctgtgtgcggatctgcacctcgacccacactccgtcgggtcccatcaccgtcgagtgcagcgcctcgtagccgttggccttgggcatcgaaatccagtcccgcagccggtcgggcttgggggtgtaaatgtcggtgatcgtggagtaaatctgccagcattgggttttctccgacggaaacggcagcggcttgaagacgatgcggatggcgaacaggtcgtaaatctcctcgaaaggaatctgcttgcgctgcatcttgctccagatcgagtagacgcttttcacgcgtcccgaaatctcgtagttgatgttgtcgcggttgagcgaggcgatgatcggggcgttgaacttgttgatgaactcccggcgcgaagcttcgctttcctgcaatttctgcgtgatttcggcatactgctgcgggaagcggtacttcatgcagaggtcctccagttcgctcttgatcgagtagagccccagccggtaggccagcggcgcgaagaggtagatcgtctcgcccgtgatcttgatctgcttgttcatcggcatcgcccccagcgtgcgcatgttgtgcaggcggtcggcgatctttatcaggatcacccgtacatcgtcggagagcgtgaggagcactttacgaaaatattcggcctgctcggaggtgtcggcgttgaacacgccggacattttcgtcagtccgtcgaccatcgaggcgattttcgggccgaaaatgcgttccatgtcctccacggagtattccgtgtcctccacgacgtcgtgcagcagggctgcgacgaccgatttcacgcccagcccgatctcctcgatgacgatcttggctactgcaataggatgcaggaggtacggctcgccggagcggcgccttaccccctcgtgtgcctccttggccaggaaaaatgcacgtttgatgaagttccagtcctcgtcgttcttgcagatcttggtgcacgagaggagcaggtcgtcccatttctcctttataaggttctcatcctcggcagtatatcccatagactactcctttttggtggtcttcatggcttcgcggaccttggcctcgatctcgttgcgcagctcctcgtcgtttttcagcagctccttgacggcgtcgcgtccctgtccgatcttgcggtcgccgtaggagaaccacgatccggccttcttgaccacgccgtaatcgacgcccaggtcgacgatctcgccgatcttcgaaatgccctcgccgaacatgatgtcgaactccgcgcgtttgaacggaggggccaccttgttcttcacgaccttgaccttcgtgcgggttcccagctggtcctcgccgtccttgatgaccgacatgcggcggatgtcgatacgcaccgaagcgtagaatttcagcgcattgcctcccgtggtggtctcggggttgccgtagaccacgccgatcttgtcgcgcagctggttgatgaagatgcagacggtcttggtcttcgagatgctcgacgtgagtttgcgcagcgcctgcgacatgagtcgcgcctgaagacccatcttcgagtcgcccatctcgccctcgatctcggccttgggcgtcagcgccgccacggagtcgatgacgatgatgtcgatggcgctcgaacggatcagcgagtcggcgatttcgagcgcctgctcgccgttgtcgggctgcgaaatgagcaggttgtcgacgtccacgcccagtttctgtgcgtagaaactgtcgaaggcgtgctcggcgtcgatgaaggccgcgatgccgccggccttctgcgcctcggcgatggcgtgaatcgccagcgtggtcttgcccgacgactcgggaccgtagatctccacgacgcggcccttgggatagccgcctacgccgagcgccatgtcgagcgtgattgaacccgtcgggatgaccggaatgtcgttcacttcggtgctgttcatgcgcatgatcgagcctttgccgaagtccttctctattttctgcatcactgcgtccagcactttgagcttgtccgcgtttatctgtactttttctgccattatggttttgttttgtatcattaactttgtttcggtccgctgctgtcgaacttcgccgagcggcgggagccgttgtttcgccgccttgcggcgtcgggtccccgcccgagacggggatttagggggtgggtcggattcgtaaacgacgctttaggcggcgaatacggcggtcggacgcacatcggcgggacaaattgtatcctgtccttacttataggaatcaatgatctgccggtagtggttcttggtgtccaccttggtgaaaatcttctcgatgcggccttcggcgtcgatgacgaacgtcgtgcgcagcacacccatgtacttgcggccgtacatcgacttttcggcccacacgccgtaggcttcgcacaccgagtggtcggtgtcggagagcagcgtgaaattcaggtcgtgcttgtcgcagaaactgcggtgcgacttctcgctgtcggggcttacgccgatgatccggaatcccatccgtgtcagttcggccttgccgtcgcgcaggcttttggcttcgagcgtacagcccgaggtgttgtccttggggtagaaatagagtatcgtgcgctgtcctcgcagatcggcaagcgtcagaggctcaccgtcttgggtcgtggacttgaaatcgggggccatctcccccgcctgcaactgtgtcatagcgttttccgaaaaagagattattttctcaaaggtatgaattttccggcgattttcatgcttcccgggcgacttttttgcggcctaatcccattggtaggtcacttcgatctgctcgttgaactcctcctgcgtggtgttgagccggtgcaggcaggcaggacaccggatggccgtttcggtctcgacgtattcgccgcacccgacgcacatcggcagcaggccgtagcccggctgcatggagtgctcgaactgcgctccgcagtgcttgcacctgattctgtaagctgttcccattgtcgttttgtttttggttcacgctgcaaaggaacggtctgcgagtgacaggttgtgacacagcggtgaaaaatgtaaaataaacccgccgacagctgtcggcgggtcgttcggctaatggtggtgttcggcctccatggcctcctgccgggtcttgtggaccgtgccgtgggggtgttccgccggggcgtaaatcgagtagattttcagcggtttgtcacccgtgttgacgatgttgtgccattttccggccgggaccaggatcgcatagtcgtccgagacctcgcgcacgaagtcgaggttgtcctcgctgtcgcccatcatcacgcgtgccgtgccctcctccacgcgcaggaactggtcgatgtcgtggtgttgttccagccccacgtcgccgccggcgggaatcgccatcagcgtcacctgcaagttgctgccggtccacaatgcggtccggaaattctcgttcgcgagcgtgtggctttcgatgttcagcaccgtcggttcggctccgtgatctttcagcgagacgggttcggcggaggcttttgcctgcggggccggagcttgccggcagcacgatgcggcggcgagtgcgaggcacagcgcgccggtcgtcaggaggtgatttcgtttcatgcggtttgctttcaaagtttgtggaaatatagtgaaaaatttacattttcggggtgtttgccgcaatatattcgcggatatagcccgtcagctcgggggagtcgacgatgcggatgtcgtccagcagccccacgacgaagcgtcccaccccggccattccggccacctccgtgtcgagcgaccagcgtccccgccccagcggtttcacatcgcgttcggccaacggatactcctcgcacaacaggttgtaggccagcgttcccagttccagccgcacgcggcggcgcgccccgccgtgcatgcggaaggcgtcgatgaatccctcgctgtgggcttcttggtgctcccacgccgcttcggacagctccacggagccgatacgcgaggttttgaagagtttgttcgtgtggctttcgaggtcgtagcaccacacctgcacgtagttggtcgtgaaggcgaaaggctctaccctgcggtcgcggaccccgcctccgtgggccgacaggtagccgtgcagcacggcctgccgctcctgctcgatggcctcgatcagccgccggatgttcggggcgtttttgccccgcacgacggtgtcggccagcgtcttgttgtcgtagacggagtagagtttgcgcttgaggttctgcttgagcatattggtgtcgtcgatgttctcgatggtgtttttcaggatcacggcctcctcctcggtgaagtgcaccagctgcgagatgtcgcggaagtgcggcgactccttgtcgagacggatgcagtcgcccgatttcttgatcacgaaccccgcctcgcgaaaggtgtcgatataccggtagaccgtgcggcgcgacatctggagccgttcggccagctggtcgacgttgtaggtggtgttggccgtcagcagcttcataagccgcagcaggcgttcgagtttgggttggtccataattattcggcagcagacggctgttcgccgtgcagaggtcgtaaattagccataagaaagtcggatgttctttttatgaagtcatcgaatgcaatcagcatcgggtcttcctttccgccgtgagcggcattttcgacaatcatcaactctttgggtgtcgtttcgggcagcgattcgattattttcctgctcatccagacgggagtgcggaaatcgttctcgcctacgatcaggaacagaggtttttcgaattccggagcgatatgtacgggcatcagttcggtcggaaaatcatccggaaccagcaattcattgcgggtcttgtttttgtactgcatgaccaaagggatgaaatcgtcgaaatccgtcggaagggaacggccgatgaaagcattcaccagattgtcggtgtgtgccgtaatcatggacagataggcgcctgtcgaccagccgacgatggccgtcgctccgtccagaacttcctcctgttcggaggtcttccgtatgacagcccggtaatcttccagcatttccgtataacacaggtagttgcgatccattgcaaagggtgaactcttgccgaatccgcgccagtcgaaagtcacgacattgaacccccgggaggtccagttcttcgccagataaagttggaagtaggacatattgcctgcatcgccattgcatatgatgatggtcgggcgctttgcctcacccggcgcttcgtgggttcggcggttttcgttcggattccgcagctcgctctcggacggcgggttttgtgcagggaaaaaccaggtttcgattttatagccgtcgtttgtgatgacttctaaatttctatatatcagcctcatgctttccggcttcctgatatatacggtatccggaataattgcatggcagtttgcgattcctgaaaaggacgcaatcaaaagagtgacgaacgctttcatgctgttttcggcaaatatacgaaaaagtcgtgacattgtctgtcacgacccgctttcgggttggttcataggcggtcagtcgagcagttcggagagtttctgcgcgagggcttcgccccgcagttgtttggctatgatcttttccgtcgcacagtcgatcaggaagcaggaagggataccgcccagcgtatagtcgctccacgcctgtgtctggcgcgggtgcagaccgaatccctgatgaatctgcgtccagcgcatgccgtaggtctcgatgcattcgagccaccgtttgcggttggcgtcgtaggagacgccgaagatgtcgaatccccggctgtggtatttctcgtaaagcgcggcgaggttcgggaactccgcccggcaaggcccgcaccagagggcgccgaagtcgagcagcacgtagcggttgcccggtttacggactgtcgcggcgagtgaaacggtatccccttcgggcgtctgtcccgtgatgtcggcataagatgttccgacatcggcgcgcatcccggcgatcgtcttgcgcagtccgagcagggcgggatgcttttgaaatgcagccgggaacgaatccaataatggcagaagctcgcgtccgggacgattggtcagtaattcgttctccagcagggatagcgccagggcgttgcggttctcgagaacgaccgcgcggaataaactgtcgcaggcttcggccgtacgcagcggggaaaggcctttttgcctcaacccggcgactttttgcggcagttcgttcctgaactcgttctgcggcgttccggtcaggatgaattcgtcttcattgcgcttttcaacacggatctcgccggtttcgaggatgaaatccgagtcgctgatttgttctccgtcggcgcctcgtcccatatagaggaaggcgctcaccggatagggccagcttcctttcattgcgaaggacgagttgtcgattcgcgccgagtcgatgatggtctccgggcctccggcataggtgatgatgtacatgtattttccgtcggtaaacgccgggtcgcggcccgtaagggtgaattttacggctgtcgattggctgcaacccgccagaatcgcggttgcggcgatgatcgaaaggggctttttcatgggtttgagggttagtgactccaaatatacaaaaaagtcgtgacattgtctgtcacgaccctctgtttgtaccgacggtatgtgtacccaatttattgggcgagcacctttttttcgatctcctcgacctggcggcggaacgccttgtcggtctcgatcagattcgtcacggccttgcacgagtggagcaccgtggcgtggttgcggcctccgatggccgacccgatcgtcgtcagcggcgccttggtgtgctgcttggccagatacatggcgatctgccgggcctgggcgatttcgcgcgtgcgctccgtggagttgaagcgtgcgaagtccagattgaggtattcgcacacgacctcgatgatgtggtcgatggtgatttccttctggtagagcttcacgtagaccttcagaatctccttggccagcgacgtggtgatcttgcgtccgaggaacgaggcgttggccaccagcgacgacaatgcgccttcgatttcccgcacgttggccgagatgttgtccgccaagtacgccaccacgtcgtccgtgatctgcgccccgagtttctgcgccttggcgcgtatgatcttgagcttcgtgtcgtagtccggcgtgttgagctgggccgacagtccccatttgaaacgggtcagcagtcgctgctcgatgtccttcaactcgacgggcggcttgtccgacgtgaggatcagctgcttgcccgccagttgcaggtggttgaagatgttgaagaacgcgttctgcgtaccggtctttcccgtcaactcctggatgtcgtcgatgatcagcacgtcgatcatctggtagaagtggatgaagtcgggaatctcgccgttcttgtaggccgtctggaactgcgcctggaacttgttcatcgagacgtacagcacctgcaactccgggtggcgctggcgcacctcgtggccgatcgactgcacgatgtgggtctttcccagccccgaatccccatatatataaagaggattgaaggggttgtttcccgggttcaccgctacggacatgcccgccgagcgggccagccggttgcactcgccctcgatgaaggtcgcgaacgtgaggttcggattcagctgcggatcgacgataagcttcttgacacccggaattacaaaaggattttttatatttgcggtgttggtctgcgcattgaaacgcgagatggctgtcgtgtcggcgtcggccgctacgggaaccgccggagccgtcgcacggggcacggcgtagtgcagtctcgtctgctgcccgtagagctgcgagatgatcggtttgaggaacgggatgtagttcttctcgatttggcggacgtagctttcgttgggaaccctcaagcgaagcgtcgtgccgtcgaattcgagcgggacgatgggctgaaaccacttttcgaactcctcggcggaggtccgggccttgatctggtccaagcagttttgccatatatcgctatatgtccgtgtgttgtttaacatgacagagggttgcactatttttgatgtgacaaagttgtgaataattttgcaaaaagattctcgattttatgttgcagttctcctttttttgtatatagaaaagcaacggtttccggggtctcaattttaactccctgatagtgaattatcgaattttatttcgtatatttgcatataatttttttgggacttccgaagtcaaactataaataaaactaataaacttatggcaaacgaattggaacaattggttctgaaaaaagcccagagttggctcgacggccactatgacgaggcgacgaaaaagcaggtcaaatacctgatggacaacgatatgaaagagcttgtcgagagtttctacaaagacctcgaattcggtacgggcggcctgcgcggcatcatgggcgtgggttccaaccgcatgaacgtctatacggtgggcgccgccacgcagggtctttcgaactacctgaagaagaacttcgcgggcgagcgggtgcgtgtggccgtggcccacgacagccgcaacaattcgcgcatgttcgccgagcatgtggccgatattttcgcctcgaacgggtttcaggtttttctgttcgacgcgctccggccgacgccggaattgagcttcgccatccgcgaactgaagtgtcattcgggcgtggtcgtcacggcctcgcacaaccccaaggagtacaacggttacaaggcctactggaccgacggggcgcaggtcaccgagccgcacgacaagaacatcatcgccgaggttgcgaagatcaccgacgtggatatgatcgagacgggcaaaaatcccgaaaatatcaccatcctcgacgagaagttcgatgaaatctatttaaataaggtgcacgaactctcgctttcgcccgaaagcgtgaagaagcaccacgacatgaagatcgtctattcgccgatgcacggtgcgggcgtgcggctggttccggcgtcgctgaagaaattcggcttcacgaacgtgatcatggtgaaggagcaggctgtcatcgacggcgacttccccaccgtcgagtctcccaaccccgaggagcgcaagacgatggcgatggccattgatctggccgcgaaggagggcgccgacctggttctggccaccgaccccgattcggaccgcatcggcgtggcgctgcgcaacaagaagggcgaatacgtgctgctgaacggcaaccagaccctcgtgctgctgttgagctaccagctgacccgctgggccgagcgcggcgagctggacggcaaccagtatgtcgtgaagaccatcgtcacctcgcagatggccaacgccgtggccgagcatttcaaggtgaagtgttacgactgcctcacgggcttcaagtatatcgccaagatcatccgcgagaacgagggcaaagccaagtacatcggcggcggcgaagagtcgttcggttacctggcgggcgactacgtgcgtgacaaggacgccgtgtcggcctgctcgctggccgccgaggccgccgcatgggcgatggatacgatgggcctgacgctctacgagtggttgcaggaactctacgtgaaatacggtttctaccgcgagggcctcgtttcggtggtccgtaagggcaaggagggcgccgagctgatccagaagatgatggtcgacttccgcgccaatccgcccaaggcgatcctcggttccgaggtggtgaagatcaacgatttccagacgctcgaaacgctcgacgtgaagaccggcgcgaagaccgccatcgagcaggaccgcagcaacgtgctgcaatggttcaccgccgacggcacggccgtttcggtgcgtccctcgggcacggagcctaaaatcaagttctacttcggcgtgaaggcgccgctggcttcggtcgccgatttcgacaagacgctggctgaactcgacgccaagatcgaaggcatcaagaaagacctcaagctggagtagccccctgctttcggggcggttccgtcccgccgatacctccgaacgattccgttcggaggtatttttttgctctggggcgttccggggcgtttgcacggccccgaaaagggctggctccgcgggcatgaaatcgcctttgctctatattctcgaagtgctcttttgtagcggactgctcctggcgttctaccgcctgctgttggtccgcaaggtttcattcagggcctgccgccgctatctggtcgctgccgtatttctctcggcggtcatcccggcgctcgacattccgctctaccctgcccggacggtggtctatccgctgccgctgatcgccgcgcccccggctgaaaacttcgtgcagacgaccggggagcttcccgctgccggtccggtcgtcccagccggctggcggcgcatattgcgcccggtggctgtgggaggctatctgacggcggtgtttctgtcgcttgggtttcttgcggtccgcatggtcggaattcgccgtctgcggcgacggtcgcgtctgaccgattgcggggcgtacacccttgccgagcatccgcagatcgccactcccttttcgttcctgcgcacggtttttctgggcgagggatacgaagggcgccggcgcatgatcgttctctgccatgaagcgggtcatgtccgtcaccgccattcggcggaacgcatcgccgtcgagctggtccgcagtctcttttggttcaatccgttcgtctggattgccgggcggtggttgcaggaggtgcacgaatgggaggccgaccgcggcgtgctcgacgccggttacgaccttaccgaatacagaacggttatttttcaccaactcttcggccataatccggatatagcctgcgggttgaatcattcactcaccaaaaaacgatttgccatgatgacccaattcagaaaacgccgttttgccgtgctgcggctcggtgccgccattcccgtggtggcagcaatgatgatgctttgcagttttaccgtcaaaactcctcttccggcagccggggatccggaccggccgaccgttacggtacatatttcctccggcggaaagattctcttcaacggccgtcctgtgacggtcggggatctggagcggctgatcgccgccgaacgcgaaaaactctccgaagccgaccgtgcgcagatggaggtggttctgcgggccgacaaagatgctcctatggccgatctggccgacgtgatggacgcgtcgcgccgtgcgcatgcctttcgtctcaaactgactgcggaagcttccgatcccggcatcgtgcggatgcttccgcccgatcccctgcgcctgcctgccgacagcgcggattatgctttgcccgcgacgaaccgcaacgacaggtaattgcccgcgccgtgccgttgaaactgaccgaaccaagacgctgatccctcccctgatgccataagcgggaaatgccccatacgacggccaaagccgccgcatggggcgtttttacggcttcgggccggggctttgccgcggtcggcggcgttttataacttggggttgccgcggtgacgctccttgtcgcgggcggtctttttggcgaaattggcctcaacggccgccgtgaggtccacgcccgtctggttggccaggcacaccagcacccacagcacgtcggccatttcgtcggcgaggttctccttttcgcccgccttgaacgactggtcgccgtatttgcgggccatcacgcgggccaactcccccacctcttcggtcaggcaggccatgttggtcagttccgagaagtagcgcacgccgtattcccggatccaggcgtctacgcgctcctgcaattccttgatttccatcttattttactcttatcagattcagcccgtcgcgcagcgggacgatgacgttctccacccgtgcgtcttcgacgaccatgcggttgaattcgaggagcgcctgcgtgtggcggtcgttgtgcgccacgggctgcacgaccttccccgaccagaggatgttgtcggcgatcagcaccgatccgctgtgaacaagcgccttactgccgtcgtcgcccatcagcatccggtaataggccggatattcgcgtttgtcgccgtcgatgaacacgaggtcgaattcgccgcccagtttcggggcgatgtcgagcgccgagccgatgtgcaggcggattttgccgccgtgggccgagcggtcgaaatacgatcggatgaactcttccagctcgtcgtccacctcgacggtgtgcagttcggcctcttcctccagccccgcggccatcgagagcgccgagtaacccgtgaaggtcccgatttcgagcgcccgccggggccgcagcatccgtacgagcatctccagcagacggccctgaatgtgccccgagatcatccgcggcgccacggcccgcagattggtctcgcggtcgagttcgtgcagcagctcctcctcgggttccgaaaaatcgtggacgtatttttcgagagcgtccatctattcctgataaaatccgtgtttgttgaaggcgtacgatgcggcgatttgctccggcgtgtcggcttcgagcgcgagcaggcattcgcgcgtgaattccagataccccgagccgttggccgtcacgacattgccgtcgcgcacggcctgccgctcctggtagagtttctcgcccgtgtagttcgcgccgccccattcgcgaagcatttcgaggccgtttccggtgtgccttacgccgttcaggaatccgtgggccgcgaggaacgatgcggcgttgcagatcgcaccgacgagaatcccgtgcgacagggcctcccttaccagcgggacgatccgttcggtttcgggcgtcgcccagctcataccgccgacgaggatcagcccggcgcagtcgtccggcagcgtctccgtatcgcagtcgggggtgagggtcatgccgccgatcgagcgcacgggaactcccccgggcgtcgcataccgcacggcgtggcttcccgggcgtcccggcataatgccgccgcgaagcgccggggcgaggaatgccgactcccagtcggcgaattggtcgagtaatacgaacaatacggttttcatcttatttgtagattaatcgtgacatatccgaaaaaacctcctcggccacctccgtgagctgccgggccgtcagggcgcggaccttggcgtagacctgctccatggtgtcgatgccgtcgtggacgagcaggcttttgcccgccccgagcatgtagctttcgttgctctcgctcgatatggccagctgggcgatgaactgtttcttggccatcgatagctggcgcgccgtcagcggcacggtgcgcagtttgtgcaactgtccttcgatcagctcgatgcactgctccgcgttgctgtggtccgaactgaaatagatggccacgatgcccgtgtcgccgtagggcgtgtagctggcttcgatgttgtacgaaagtccgttcttctcgcgcaccacgatgttgagcagcgagttggcgcacggacctccgagaatgttcgtcacgagggccagcggcagccgccgatcctccgagatgccgaatgcccggctgccgatgatgcagtgggtctggtgcgtgtgcttcgagaccgtcttttcgaaggcccggtaaggcgcgggcgccgcgcgcacgaagccgcgctgcgaggcgggctgcgaggcgaaatagcgtgccgcgacggcttcggcggtcttggccgagaagttgccgatcgacgagaataccatctggtcggtggtgtgcgtgcgtgccgtgaaggcgcggatcgcctggccgtcgtagcgcatcagcgacgccttgcggcccaggatgttgtggcccagttccgaaccttcgaacagcatgtcctcgaaggtgtcgtagatcaggtcggcgggcgaatccttgtaggtgttgatctcgtcgacgatcacctccttttcgcgctccagctcccggtcggggaacgtcgagcggaaagcgatgtcggcgatcagctccgcggccttcgcgaagtcgcccttcagcgtcgtggcgtgaatcgtcgtgtcctccttggtggtgaaggcgttcagctccccgccgaggttttccaggcggcagttgacctgccatgccttgcgtcgctcggtccccttgaaaaaggcgtgctccgtcaggtgcgccagtccgtactctgcgggatgctcgtcgcggctcccggcgccgatcaccagcgcgcagtgcgccacggtgtttcgcacctgacggtgaatgccgcggatgccgttggggagtgtataggtagagaattccattcaattgaaaattaaagattaaaaatgaaaaattgggctgcgcggctatttttgcacatgtgtacgacaatttttcatttttcattcttcattatttttgcgcgcatgcgcaaaaatttgcccgtatggctttcggtgcacttttccagttcgcgcggcgtgccttcgaacacgacccgtccgcccgccgtgcccgcctcggggccgaggtccacgatccagtcggcgcatttgatgatgtccatgttgtgctcgacgacgacgatcgtgtgtccgcgctggatcagggcgttgaacgccgcgagcagtttcgagatgtcgtggaagtgcagccccgtcgtcggctcgtcgaagatgaacatgacgcctccctgcgccgaatccttcgtcaggaacgaagccagcttcacgcgctggctctcgccgcccgagagggtcgacgacgactgtcctaacttgatgtatcccagacccacgtcctgcaacggttgcagccgctcgacgatgcgccggcaggtggcgttcttcttgctttcctcgccgaagaaggcgatggcgtcgtccacggtcatctccagtacgtcgtagatcgacttgccgcggtatttcacttcgagcacctcgtcgcggaaacgccgcccgccgcacgcctcgcagaccagttccacgtcggccatgaactgcatcgagaccttgatcatgccctcgccctggcactcctcgcaacggcctccggcgatgttgaacgagaaggccgaagcgcccagcccgttgtgctgggcatagggctggtccgagaagagtttccggatttcgtcgtaggccttgatgtaggtcacggggttcgaacgcgacgatttgccgatggggttttggtcgaccatctcgaccgatttgagcagctgcacgtcgcccgtcaggccgtcgaaatcgccgggtttcacgcccgtgtcgtagagcaggcgccgcagcgccgggtagaggattcccttcgccagcgacgattttcccgagccgctgacgcccgtgatgcaggtcatcacccccaacggaatccgcacgtcgacattgcgcaggttgttctcccgcgcgcctttgacggttatcgagttgctccaaccgcgggcggttgccggaacggcgatctcgcgccgccccgtgaggtagtcggccgtgaggctctttttgcttttcagcagttggggcagcgtgccgctgaagaccacttcgccgccgttgtaaccggccttgggtccgatgtcgacgatccagtccgcggcgcggatcacctcctcctcgtgctccacgacgatcaccgtgttgcccaggtcgcgcagctgtttcaatacgccgatcaggcggttcgtgtcgcgcggatgaagcccgatcgacggttcgtcgaggatgtagagcgaaccggtgaggttgctgcccagcgaggtcgagaggttgatgcgctggctctcgccgcccgagagggtcgacgacaggcggtcgagcgtcaggtagcccagccccacgtcggcgaggtattgcaggcggttgcggatttcgacgaggatgcgcgacgccgttttcgtgtcgtgttcgtcgagttccagccctgcgaagaaggcgatcagggagtccacgggcatcgccaccagatcggcgatcgtcttgccgccgacgcgtacgtacaacgcctctttgcgcaggcgcgagccgccgcattcgggacaggcggtcttgcccgtgtagcgggccttcatcacgcggaactggattttgcgccgctccgagtcgatgtattcgaaaaattcgtcgagtccgtggaaatattcgttgccgcgccacagcagccgtttctgctcgggcgtcagttcgtggaacggcgtgtggatcgggaatccgaacttcgaggcgttctccacgagctgctgcttccatttgcgcatcgtctcgcccctccagcaggccacggcgtcctcgtaaatggtcttgctcttgtcggggatcaccaggtcctcgtcgatgccgatcaccttgccgtagccctcgcaccgggggcaggcccccagcgggttgttgaagctgaagaggtgttccgaggggcgttcgaactcgatgccgtcggcctcgaagcgcgacgagaactcccgtacgccctcgtccgtgacgatttcgcagatgcccccgccgtaggagaaggcgcgggccaccgagtcgcggatgcgggtctgcgagtcctcgtccgtcgctacgcgcatgcggtcgacgacgatccggatttcgtcggcccgggtgtcgggaccgattccgggcagcacgtcctcgatcagccgcacttcgccgcccgtgtagacccgcatgagaccctccgagagcagcagcgtcagtttttcgatgatcccctgcccttcgcccaataccagcggtgcgccgatgaccacgcgctgtccgtcgcgggcgagaatccgggccgccacgtcatccacgctgaagcagcgcacctcctgccccgagacgggcgaaaaggtgtgccccgcgcgggcgaacagcagtttgaggtagtcgtagatctcggtcgtcgtgcccacggtcgaacgggggttgcgcgtgttgaccttctgctcgatggcgatggccggcgcgatgcccgtgatgatgtccacgtcgggtttgttgatcttcccgaggaactgccgggcgtaggccgaaaggctctcgacgtagcggcgctgcccctcggcgaaaatcgtgtcgaaggccagcgtcgacttgcccgagccggagagtcccgtcacgacgacgagtttgttgtgcggaatttcgacctcgatgttgcggaggttgtggacccgcgctcctttgatatatatggagttttcgtgttctttcatgttacaaatattccaatccgcttttccgagtgtttcacactcgccgttatgtaccttttggtggtaaaaggcgcccaaaaccatccgcatgccgttctggcgggagtgccctcggattcgcgttgagcgggcgcagtaaatcgggcctttacggcgcaaaaacacgcgccgtttagactgtggcggctcggcaaacagcaagctgtctgccctcgcctgcggacgcctttacagcccccccccgctccgggcgcgcgtttcctcggtctctctttttccgttgcgaacgataatgcggatttttttccgtcaaaaacggagctgacccgcaaatattccaatccgttgttcgtatttcattccgcttcgtcccgaaccgagccgccggctttgcgcaatttttcgataagccccgctgcgcggctttcgcggatcgcgagccgcatcgtacagaggttgtcgaaggtctgctcctcgatgcgcggctgctgctccttgacgacccgcatgatggcgttcatcgccacataggggaaatccacccgcaccgtgcggtccaccgtcagttccacgatttcggccgctgcgatggcctcggccgccgactcccggtaggcggcgatcagccccggaacccccagtttcgtgccgccgaagtagcggaccacgaccaccaggcagtccgtgatgtcgttcgagagcagttgtccgaggatcggttttccggccgttcccgagggttctccgtcgtcgttggcgcggaacgcctcgccgcggggtcccagccgccaggcgtaacagtggtgcgtggcgtcgtaataccgtttgcgcagcgcgtcgagccgttcgcggatctcctcctccgtgcgcacgggataaatccaggagaggaacttgctgctccgctcccggcaggcggcttcggcgggggccgcgacggttctgtaactgtcgccggccacgtctaccgaacctttctgaagagccgttcccagcggatgttcgcggggaaactcttttccgcatcgagcgacagccatacgaacgacgccttgcccacgatgtggtcctcgggcacgaagccccagaaacgcgagtcggccgagttgtggcggttgtcgcccatcatccagtagtaattcatcgcgaaggtgtactccgtcgcctctttgccgtcgatcacgatgcgtccgtcgcgctcttcgagcgtgtgcccttcgtaggcctcgatgatgcggcggaagagcggcaggttctccgccgtgagctgcaccgtgtcgcccttcttcggaatccagatcgggccgtagttgtcctggctccagcggggcgcgccccactgcgggaacacctcgtcgttgggggtgtagatatagcggttgaccgaaatgacgttgctcaagcccctgaccttctcggcgagttcgtccgtgaggttcatgtagtagcccgagccgtaaccgctgtactcccggattccgaggttgtcgatggcgtactgcgtgaagggggccgaggtctgcaccacgtagttgtattgcagtccgggtatcgcctcctgcggttcgccgttgacccacacctttccgttgcggacttcgagcgagtcgcccggaagccccacgcagcgtttgatgtagttctcgcgtttgtcgaccgggcggctgatcaccgtgtatttttcgttgaggcgtttgcgtccctcctccttgccgaacgactcctcgaagctgcgcagcgtgtcgtaataggtcacgttctggttttcgagcagcaccgtgtcgcccgccgggaagttgaagaccaccacgtcgttgcggcgtatcggcttgagccccttgaggcggtggtagggccacttgatcgcctcggagaacgatttcttggtctgcgagaagggcatcgtgtggtgtacgaaggggaacgacagcggcgtgttgggcatctgcggtccgtaagccaccttgctcacgtagagatagtcgccgatgagcagcgtccgctccatcgacgaggtggggatgacgtacatttggaagatgaatagatgcaccagcgtcgccacgaccgtcgcgaagatgatggcgttgacccattcgtacaccgtgcggtaggttttgctgcgctggcacatcttcacgttgtggctccagacgtagcggtagaagaacttcgtgatgtagaggtcgaagatgaccggcagtcccagcagcagccagaggttgcccgtccagaccacgaaccagagcgtataaagcaacgcggccagcgtgaaaccgacccatttgttgcgtagcaagtttttgattttacccatgcggaaagccccgattttaattgtgaattatgaattgtgaattatgcattgcgcagcaggtcgtccatcgagtagaccccttgttttccgcagaggaattcggcggccacgacggctcccagggccagcgtgcggcggttcttgatcgtgtgtctgatctccagcacgtcgtcctccgattcgtaggtcacggtgtggatgcccgggacggcgccttcgcgcacggagcggatttcgatccggtcggcgggcgcctctccgctgcgttcgatgcggttggcggcgtgttcgattcccggagccaggttgacccagccctgcttgccggcgaggttttcgacgattccctcggccagcgtgattgccgtgccgctcggggcgtccttcttctgggtgtggtgcacctcctcgatgcgcacgtcgtagccgcccacgcggtcgatcatcgcggccagctgccggttgaggcggaacatcaggttcacgcccagacagtagttcgaggcgtagaacaacgccccgccccgctcgcggcacagctcctgcaactccccgaggcggtcggtccagcccgtcgtgccgctcaccgccgccacgccgcattcgatgcaggtgcggatgttccggtaggccgtttcgggcgtcgtgaactccagcgcgacgtcgatgcccgccagatgtgcggcgtcgagttcgtgcgcgttgtccgtgtcgataatcagagccgcttcgtgccctctttccgtgagaatccgttcgatttcgcggcccatcttgccgtatcctatgattgctgctttcatttgttttgtcgagatattcgtacaaagatacgaattatttatgaatctaaacgcaggagagcgtacaatagtattccggaatttcgtatatttgccggacaaatcatttccggtatgcgctattttctcgaactccggtacaacggggccgcctactgcggctggcagcggcagcccgaccagccgtcggtgcagcagacgctcgaacgggcgctcgctaccctgctgcgcgaaccggttgctctgacgggcgccgggcgtaccgacacgggggtcaatgcggcctattacgtggcgcacttcgactgcgaacgtcccgtcgccgatcctgcgcagacggtctgcaaactcaatttcctgctgccgggcgacattgccgtgggcagcatgacgcccgtggcggaggatgcacacgcccgcttccacgcccgcgaacgggagtaccgctacttcatcgagccgcgcaagaatccctttacgcggcacgagacgtggcagtattacgtgccgctcgacgtcgggcggatgaacgaggcggcggcgatgctgaccgcgtacgacgacttcacctctttcgccaagctcaattcgaacaacaagaccaacatctgccgtgtgaaggaggccgtctggacgatcgactcccgcggcacgatgtgtttcacgatccgtgcggaccggtttttgcggaatatggtgcggtcgctggtaggcacgctggtcgacgtggggcgcggacgttacacgcccgacgggttccgctcgatcgtcgagagccgcgacctgtcgcggtcgagcgccggcgcgccggcccaggggttgtttctctcggacgtggtttacccggcggacatattcgaacatcaatgtttctctaaattcaaaatgttatgattggaacgattgtttggctgatcggcctcgtgtgcgcaatctggtgcgtgctggacattttcaaaaagaacatctccacgggcggaaaggtcatcgcggcggtcgtggtgctgctcaccagctgggtggggcttgcggtctactacttctacggccgcgaccatttgcaggagtggttcaaataaccgtcctgtgcaggcgaaaacatgcggcggacccacagaggtgcgggattaaagtaatgtaacgacttgatttatatggtagttacatttttgtataggagagtaggtaacgagaaggcaacggtttgttttcagcttcttgcgctcaaataccgcatttcaaataacctatcgcaagatacgaaaaattttcgagatgggcaaattaggcagggtcaaccggcgagtgcaattttaagaaattagtttaaagaacttttttagacgaagaaaattttaattttcccgatgtcttctgttcattgtattgcacttgtttaataaactcttccgttaacacaaagaaatctgccccattcagtatatattgcctgatggtttattctgattttcaattgccccttttctgtcaggggaagcatatgaatcgacaaaacatacttttgtaccgatagtttttgcaattttcttatgacaaaagaattcgctgccatggtcgctgtgtcgcaatggtcggggacggcatcaacgacagtgcggcgctggcgcaggccgatctgggcattgccatggggcaggggagcgacattgcgatcgacgtggagaaggtcacgattctttcgtccgacctgacgaagatcgccgcggcggtccgcctttcggccgcgaccgtgcgcaccgttcggcagaaccttttctgggcgtttatctacaacctgatcggcgtgcctgtcgccgctggcgtgctctatccgctgaccaggtttctgctcaattcgatgctcgtcggggccgccatggccctgagtagtgtgagcgttgtggccaatagcctgcagctgagtacaaaacggctcggcacgaaagccgtccataaaataaatacagaatttataaccaaaaaacaaacagccatgaaaaaagagtatcgtatcgaaggaatgatgtgcaaccactgccggatgcatgtcgaaaaggccctgaacggcatcgaaggtctccgtgccgttattactctcgatcctcctgccgcgacggtcgaattcactgggcgggagccggagctggccgaattgcagcgggtgctgggcgaagattataagatcacggagcgttgaaaccccggtctcggagcggccgctatccatctataaaggtattgcggctcctgaaaacccctaaaattaggtattgccgttcccggcgtaatgtcgtttctttgtattactaaaatctgccgagacgctgcgggacggcccgttgcgccgaatgcggaaaacgaagaaaaaattcaaaccgattatgagacatttcgtttattgtgcggcgcttgcagccgccgtatttttccttgctgggtgcggcgggaacccgaataaaaagaacgcttcggagactcaaacctcagaaacgcagagttccgtcatggaggtcgataacctgctcgccgatgctgagaagttgaccggcggcaaggtgacggtcgagggcgtctgcacgcatatctgccgccacgggggccgcaagattttcctaatgggaaccgacgatacgcaggtgatccgcattgaagccggagagaagatcggcagcttcaagcccgaatgcgtgaacaacgtcgtgcgggtgacgggcacgctggtcgaagaccggatcgacgaggcttaccttgccgagtgggagctgcggctcaaggaccagatcgcccggcagcacggcgagggcgaagccggatgcagcgccgaacatcaggcccgcggcgaatcggttgccagcagcaccgaaaagcgtatcgccgacttccgtgcccgtatcgccgaccgcaaagccaaagaaggcaaggaatacctttcgttctaccatgtggacggcgggagttatgaagttttgaaataagaagttttgcacgtcatggggacacggtcgtttatgtccgccgtgaggaaatggagcaggcccgttcaccgcgacctctcctttttcttttcgggcgtactgctgatttatgcggtttcgggcttcatgctcaaccacaaacgcgatttcaattccgattattcggtgcgccggaccgagctggtcttcgcacaggagataccgcgcgccgagcaggagtggacccgtgcgcgggccgaggaactgctcctgcgcgtcggcgaggagggcaattacttgaaacattactttcccgaaccggaccggttgaaagtctttatccggggcggcagttcgctgacggtcgatctggcgtcgggacacgccgtctacgagtcgatccgcaagcggcccgtgctgagcagtctgaaccggctgcattacaatccgtcgcgctggtggacggtcttttcggatgtctttttagcgggattgatcgtaatcgtgctttccgggctggtgatgatgcgcggcccgaaaggattgcggggccgcggaggcgtcgagctgatcgcggggattctgattccgctgctgtttattttcctgacctgatccgggaaactgcgtgtgataaaagggcggacgtcgaaaacgtccgcccttctcttgcgtatgggtttgttgtcatcgttttgccgtgccgaataccagcagcgggacgaagaggaagagtccgaacaagacgacgccgacggtctgccagagccgtccgccgggcgatctgcggcggatgagcgcatagaacgcgccgagcacgagtcccagccagagggcctgaaacgacacctccgcaatccggggctttacgtagccgtccagcggcgaggtgaacgacagttcgaagggaaacaggtattttgcgtactcggcccatgcctgcggtttctcttcggggcggtattcgtccgccagtgaatagtcgcgggcgttcacggcgacatagcgtttcgattcggcgccttggatggtgaccgtccagtagaacatgtcgccgatgatcatcatgttctcccgtgtggggccgaatttcccgacgggaatctcgtgcagtttgtaatcctccgcaccgagcgtatagaaacgcttttcgctgtccaccagaaaaccgagacttttgcggtcggcgaactccgtgacgaaaatctggccgatttgcagcgagtccgcaacgtcggtacggcgcacgaacgggcggccgcggacctgcttcatgtggtagacgcgcagcgcgtcgtccaccagcaggtagccgttgtcgtaccgcttgcgcgtcgaggggttgccggagacgacgcgggccgggaacgaaaatcccttgtcccgcaggactttggtgaatgccgcgctcttcttttggtcgatggtgttggtctccatatcgacgaactcgattccctcgccggtgatgcggaacacgtccgtcgccggttctaaatcgatgcgatcgggcatcgattccagcagttgatagaccgtcggtctgcggcggttgatttcgccgggcgacgtgcggaacatgaagttcgtgcgctccacgtcgcgcgattcgaccgccacgccctcgatttcggacggaaacctcccttcggcggcgagttggcggtaatagaacgtcggcaggatactgtcgaactgctgctgggtgtaggtgttgccctgcagatcgcgtccggcgacgttgttttcgcggtcgaaatccaccgatgcgaatccgtgcgtcacgcagctgtagagcgtgaacggcgaccacgaaggcgatgcgaacacgaacgcgtagcaccacggcagcagccatgccagcagaagcgccgcaaggaggattattccggttttaatactctttatcatagatttgtcgttttgcgggttaatcctgacatccctgcttgaaacggtataccgaaagcagcgggaagaacagcgaacataccagcagcagcgccagccacggcagcatgccgtcgtaggcctgcggggtgtcggagaggaagaagatccggcagacgcccacggcgatcagcagattcgccagccgccgtttccatgtgggttcgagacagatccatgccgtcagcaggtagagcgtcagcccggccagataccacggcagcgccgtcagcagaatccgcgcgaccagttcgggcaccagcagggcgtggaagtacccccacagcacggcggtttgcacgatgaacagcaatgccagcgctcccagcccgatgcctgacatcagcagaatcatcttccactgtggaaagggcaggtgaagcgtcagcttcagccgtttctgggccatttcggggacgaactgaaccactgcgagcaatacgcccagcagggccggcaggtattggagaatgtcgatgaagacaacttccttttcgagcatcacctcccagacgtgcgccgcacccttgaaggttatcacccgttggacgcgcagcagcgcataggcggtggctccgaagaggaacaatgcgctcagcggatagaagcagcgcattttgatccactctttgtagaatatggctttgatcataattcgggtttagtattttccggtcagtccgatgaaagcgtcttcgaggttcagcgtttcgccgcgcaggtcgctgcagacaatgcccgcgcgctccagcacgccctgtaccgtcgcaggggagtcgaacgaatagagttcggcgcgcccgttcacgacgctcgggtggtagaggccgtcgccggcggggatcgtgacgtcggcgcccggcgtgaaggtgtatcgccggaacgtgccgagcagttcgccgacgggcatctgtaccagaatgcttccgtaatccatgatgatacagtcgtccacgagcttttccatgtcctgaatgatgtgcgaggtaaggaaaacggtcttctcctcgctctgcgcatagtcgcgcaggtattctacgaataggcggcggtaaccggggtccagtcccatcgagaagtcgtcaagcacgagcagatcggcgttctgggcgagaatcagccctaaggccacctgcgaacgctgtccgcacgacatgcgcgagatgcgctgccggggcgccaccttcagcatttccatcagtccgtaataggcgtcgcggttccagcggggataaaaccgcgcatagaaccgttcgatctgctcgatggtcatgaaggcgtactgcacgtgtccctcgatcagcagggcgatccgggcgcgggtttcgggccgcatcgtgcggatatcctcgccgaagatcagacactgtccggcgcgcggttggagatagccgctcagaatgttgatggtcgtggtttttccggtgccgtttttacccaaaagtccgaggatccgcccgcgcggaacctcgaaactcaggtctttgtatatcagtcgctccccgtaacaatgggtgaggttgcggcattcgatgacagaatcggtcataaagaatggtcgttcttccggcttacttgatcagcgacgccttcgtattggactcgaagtcgttggtcgagttgttcgagtcgatgagtttgccgtcggaaccggtcttgcggatcaccgacttgccgaagcggtcggcatctccgtcggccgtaccgcaccatgcgtaacctgcgtcgagcgaagcgtcccacggggcgatgtagtattcgtcgcggcagcccgtgttcacggcgtcgagcacccattcgttaggcacgcggtagcagttgcgcagcggcatcgtgtagtccgagccgttcggggagtggaagatatactgggcgtctttgagcgggtattcggcgaggaactgctctgcagtcaggccgacgggcggcatggcgatagccacggcgttgaagccgcggttgtggagcacttggaccgtcaatgtcgaagcgtaccatttgtcgaggttgggcacgtcggggttgtcgatatccagatagttctcgttcgacgaaacgtcgtaccactcgaaatcggctttcgtggcgtcccacgagttcgggttgccgatggtgtggttctgggcgttgttgacgacgatcagcgactcgccggctttgaccagcacatcctgtccgttgccgggaatgcagtagaacgcattgcccgcacaacactccttgcggaagtccttgccttcgatcatctcgctgttcatgcccgaattgagtccgctcgaaaggatcagcatcatgccgtcggcatagaggtcttcgtcggagttgttacggatcttgatgtactggtcgcccagccacctgtcaggctttcccgtttcgggaaacgccgtgcctgtgaagtagatctcctcgatcacgaattcgccggcttgcagcgtgatgtcgctctgtttgatggttacggtcgccagaacggtgctcttgccgctccgcgtcacgttcacgacggtcgaacgttccgtccccgtttcgttctcatcgacggacagcaccagcgctttgcccgaagattcggcttcattgatctgaacccacgacgcagcatcggcgggaatattcacgtcgaaattttcctcgggcacgtttaccagcacattgccgccgagcgcgcgcaagatttcggatacgacgacgggattgaccgtttcttcgggatcgtcggtgcaggatgcgaagcccgctgcgaagagggccgtggtgagaattaagaaaagctttttcataattggtttttattattggtttgacaaatattggttcgatcgtttagaacaggatgccgaacgtcgccgtcagaacgtgttcggacaatcctccgctgtaaaaccggggcgtccaccccgcctcggcgaagcaggccagattccggctcaggcggcgttcggcccgcagggacacctcgggggcgacggcccggccgctcagccgcgccgccgtgtaagtcaggtattccgaaatgttgttcagcacgttgctgagcgaaacctcctcgtcgggcgagacgtaacagccgattcctgccgtcgctttcacgcgccactgcggacggagccattctgcgctgccgcgtaccgctccgcagaactgcgcaagccgcatccgccgtgccggataggcgtacgtggccgtggactgccgccattccgcgcggggactgagcatgtaattcaccgtgccgcgccgccattcgacggtcgcttcggcgtcggcgtgccagatacggttcttatacatcgcctgttcatcgacgatgacgctgtgtcccgtacggtcggctatcatttcgatactgcggcgcagttcatagccgcctccggcgcgcaggctccagcggccgctgcggtaggctgcggagagggtcgcctgacgggttttgagccgggttatggggaccgtgttgttggatttgttgagccgctccgtcgtaaggctttcgaatgcggcacgggcataccagcctttcgcgtgccgcggcatgagctgtgccgccagcagacaaccctttccgtcatagccgatgttgaaactctcgctgttcagtgaatagcgggtgtaataactgcccagtccggtcatatacagctcggaagagctggcgccgggcggatagaaaaagtctatgtcctgatcctgtttatagagccgcccctgcaggtccagccccaaaacgtactgagggaactgcatgcctacgccgagtttgatcgtgaaatccgacacgacgttgtggggccgcggatcgacctgacggtattcctgtccggcgcggtagtcgccccggatcgcaaggtcgaagcgtcccacccggtggacatagccgccgccgaaagcatattcctcggtcgagaggtttcctccggcggaatccgccgtgatgcagggatagagcagcaggtagtcggccgtggagttccagcagacgttgcggcggttgccgcggacgtaccgggcgtctgcccacgttgccgaccgctcgctgagccgccggtagctttcggcataaaatcccccgtcgaaggctccgtcgcccagcggctgcagcagcgcctcctgctcacggcgcaggtcgatgcggagcgagatctgcgaaagcgactgttcgctgcggtagagcatcatcgcgggcgactccgtatgaaatccggctacggcccgttcgtcctccgcgctgaaaacggaagaacgctccaatacgccgagcgtatcgcgctgggcggaagcggcggcgggcagcagcgccagtatcgacaggaaaagggccttcatcatcgtcagatcgattttagtaacaacacgatcgattcgctgtcctctacccaagtcattgctactggaatctgattgtaatccgtgcagcgcagaatcttcttttctccggtcgaataggtcgcgtcggcttcgacgatgaacgtgtaaacccctttgcggagccgtattgtcgcgctgttctgttcggcggcgggaaatggcacccgctctccggagttgatattgtcgaagtaggagatgtccgtgcgtatttccagcttttcgacggggcggctgtccggcatcacgaaccggatggacagttcggtgaaaatcgaatcgtctttttcgcaggccgaaaacagcagtgcggagagcagaaacagggtccgtatggtagatttcatcatcatcgcattacagtttgaagttgagttccatgccgaaataggggctggaatagcggcgtaccagtgcgttggtctcgtttctgtacgaaggactgtatgtgaacagccggtttacgaaaatcgcaatgttgagccggtcgcggtaaagccgtttcgagattttgagattgacgttcatactgaaaggcgtgagacggtagagataggcttctttcgatacgttgtcgtggatcatatgctgcaaaataccgtcggctgccgactcggccgtaaacggatgttcctgtaactgcaggtcgaggtagctggtcggcgcaggattgcaccattcggccttcatgccggaaaaccactggcattggaacgacgtggagaaaatcagccccagtttgggaatctgggtgtcgagcaggaaattggtgttgcatacttcgtgaaacgtgttgtcgtcctgatcgtaaagcccgatgtaaggatagggcgtcccttctgcgagctgtacggtcgtcaggacgtactggggttcgctgttctcatagcgggttttgaaataggcgcccgagacgatgagtttcgtggccagcgcccggatgcgccgcgtggagagcgagaattcgatgccctgcttgaatgtgcggcttccgttggtcttgacgccgacggtctggaataccgttttgtccttgtagggaagccattcgagctgcggcggtccggtgaactccatatccttgagcggtccggtgtcgtattcgcggtaggtccgggtgagtacgtcggtcgaggtgcggaatcccgaggtcatattctcccggaaataggttaccgacagtccgtatccgttccactccgcattgccgcgcacctcccatttgaagttccgcgccgccttcaggtcgtaattggtggggtcgtgcttgaagacttccacattgacacggcgtttcgattcgtcgtccgccgggaaatagttgagccgcgtgtaataggagtagtccggttcggggaagagctggtcgagcgtaggcgttttggtgtgccatcccgcgccgcccgcgaatgtgatgcgcatcgggtcgcctgccatgtcgaacgccggaagcgtcaccgagaggttggcacgcggatcgaaatggaatttgccctgcagggtgtaacggcttccgagattggccatggccgtcgtacgcagtccggccattatctcgatccgccactcgccggccgtaatcgtcgtattgtcctccagaaacgccgagagccggtgcagcgccggcagggcgtcgtaacgccgcggatgggaactcatcaggtcggtaaatgggcgcgtcacgtcgtaaagcagaccgccgccgtaatttttcgacatgttccattcggctccgatgcggatcgtgttgcggctcagcggggtgtcggctcccagcagggctaccgccttggcgttggcgtagaacggtttgttgtccacctgcagggtcgcttcatagcggaccggcagcacttccatatcgaagacgccctcttcgactgccgtgcgtatagggacgttgccgctgttcgctcggtaacgccagcggtcgatcaggtcgaattcggaagagacggaagcggaaaaatcgaagctgcggaaaaaattcgcacccttggattcggcggtgaaattcaccgccgcgacgacgttgttgtaactcgatttgtagcgttcgagggggatgcccgccgggccttcgtcgatatcccggtcgcttttttggcggtcgaaagagccggtgtagtcgagcgatccgcccaacgtgtaacggtaggccgaggtgctttcccagcgtttcttcatgcgccacgatccggtcgcacgctggtagttctggcgcgtattgcgcgggtcgtcgtgggagttgagccatgtcgcgccgacgttcatcgtcagcaggtcggccggagcgccccattcgaatcctttgccgacatagagcagctggctgcccagatccgctttgaagcgggcttcgaggttgcggcctccctccttgcgcttgatcttgatcagtccgctggtcagatcgccgtattcgaccgacggaatgccctgctgaatctctaccgaagctatttcatcggtcggcatcgtgcgcatgtcgacgcctctgttcaatgaaatattattgccgacggtcgttcccgaattgtatgtcatgcccgcgtcgttcgacatcggaattccgtccatgacgaacgaaacgccgagcgatgtagtctggtaatcgctgttcgaggtgccgatctcgcgcagatgaatgtggttcgaggagaaaaacgaggggtcggaggcccgtccgccgggcagcagttcgagcaggtccccgaaactcgacggctggatgtggttcatcgcgtcccggccgatatgcacgcccgagaccggtccccgcacttgggtcgccgtgattacgacctcgcggatctgcgtgtcgcttgtccggagccggacggtccgcagcatgtcgctgccgctgacgggccgtacctccatccgttgggagacatatccgatatatgagatatccgcattgtaggtattcgcgggcagggtgaaacgtgcccggccctcctcatcggtcgtcgtcgcgtaggcctttcccccccccgacataggagtcagcgccaccgtagcatacgccagcggattgtgcagggaatcggtaacttcgaacgtgatcccggcgtcgggccggccggactgcccgtacgtgtacgcaggcagcaggataaatagcaaatatttcaggagtagccgcatagttctgttttcacgggacaaaagtatagcgccccggcatatgcggcaatcgccatatcttggtaaattgcattgcaatcatcaccaattaataatgagttgcgttcgtgcggcatcccatcataatgctatccggccgcgccaaaacccctaaaatccggtattgacgatccggtgggaatgctgtttctttgccgtaaaccaaaaacgacgaaattatgactggtatctttttcggcagtacgatgggcacgaccgaggccgtggctgcggatattgccaaacaattgggcgtcgcggacgccgatgtacacaatgtggccgatacgccggccggcgaagtgcagaaatacgacctgctcgtgctgggttcttcgacgtggggcgcaggcgaattgcaggacgactggtacggctttttggatcagctgaaggcgcaggatctgagcggtaaaaaggtggcgcttttcggctgcggcgacagcggttcctatcccgatacgttctgcgatgccgtcgggctgatttacgacggcttgcagcagagcggctgcacgttcgtcggagcctatgcgcccgaagggtatgacgaaacaggttcgctggtctgccgcggcggaaagttcgtgggacttgccgtcgatgaaagcgcgcccgacaagaccgaccggcgggttgccgcatggtgcgaacagattaaaaacgagtaacgatgagcgccgaggagttcagccgttacgattcgatgaagctgttcctgcaccagatttacgagttccagaaaggtgtacggagtctggtgctctgcacgatgtgccgcacctgcgcttctctgctctccgagcggctggaaaggctgggtatcgcttaccggattcagtcggtgaccgacagcaaggtgaatctttacttcggcaaccgcatgtgtctggagaccgtggcgacattcatccacaagccgctcaacgaactctccgccgaggaggatttcatgctcggcgcgatgctcggctacgacatcgccgggcagtgcgaacgttattgcaaacgaaagtctccgggtgtttcatcagaacaagcggcggtcaactgaccgccgcctattccttcctgatctgcgccgtgaacgaatcccccgcgccgacaccgtcggccacttcgacgtgcggcgtggcgacgtacgacatgccgtccggagtgaatacatggcttccgacggcgccgcaggtgagtatcacggtacggagtccgtatttttcgagcaggtcgcggcactgcgcctgtatgccgaacatccggcttacgacggtcaactcctcgtcgtttgttttcagaatattgctgcggcagagcgagtcgtggaccacctccgacgaatagaaatgctgccgcaggttgatgtcgaagatcttataatgtcccgctgcgcaaaaaacggaactgcggaaaagccacagtcccgattctttgccgttgctctccgttattctgtttcgaaatcatgcgacagcttatgtccgttctcatcgacacgcaacgatacgatgtggagatgctgccggtcaatgtccttatgcttgaagacgatataaggctggttgccgtaacccatacgttccatgtattcttgtgtgatctcacggagctgttcgtcggtcaacttgtcttccggcgaggaattcagcgaagcatggaaaaccgtgctggtcgtccttctgttggcttcgaggtacggccggaaactctccatgcaagcgtcgatatccagtcgcccgtgtttgtcgaagggttccaacatcttctgccagaagagcacctcggcttcatccttatccactttttccttgttatagcgcaaggctccgccgggcgaggaacccgaccttatattcgcaaccattccttagcttgtttggcaaggtgcagaatctcgatactaaaggctttcaattccctcgtgcgctgttccaatgcggcgatctgatgcgggatcgcgacgctggaaaagtgagaattgatggctttcacaacttgattatgtaggctaagtacccggcgccttgtcatatttctatgataggtttcccaatactcgcctccgaaccggacgtacaccttccagcgtatccggctctccgctaatattgtcagtctaaaacgttccatgatgtatcttttgatgacagcttccgcaaacggccatagccttacgccgtctggcaatcatcagtttttcccaattctccttgcctttcagttctccgagtttacgcacatggtgcataaccagattatccgtagcaccgcacaactcgcatttccgagctttcagcctgtctataaggcttgtggtgctgacgccgggcattggattcgggcatctgtcaatcgaccgatcataagaaggtctttttcttttgaacccttcattgtataagcgacgttcttttgctttgccgttttttaccgtatacccgactgtaaagactccgttgcgtttgtatttccggcaaattcgtcttactgtggttcggtatttcccggcaaaggttttgtacatactgtactgcatgatgtagtgaaaagtattcagttcagaagcgttgttagctatcgagtaatagttgtaaaaccctctgatctcggcattgtaactgtcaaggatttcaaggtcgtcattattgataagttccgacctatgtttgggaatccattgctcgtgcccgttatgatagctgaatttcagcaccccgagttccagcaattttttctttattacttcggtcgttacctttaatctgaccttgtttccatacacacgggacaggcttccccgtttgttccgtttttgcaggttcgacttgcggacagtcacctcatatccaaggaattttgcaggcttttcagtatgagtgacgagcgttttctcatccgatagttccaatgccagtctgtctgcaaggaaacgctttatatcgtccttgatctttacggcatcttctttactgccgataattccaatgaggaagtcgtcggcatacctcacatatttaagcctcttgaagtttccgtccatagggtcgaagcacggcatcgcggatcgggttttgtctatctctttgagccgtttgacgagcacttttctttctacattatttgtcgctgttttgagttcacgcataaccagcctcttttggtaagtgagaacttcgtattcccgttgctgtcttcccctatctcccttgtcgaatttggaagcatattctttcatgtacttatccagtttgtccaaatagatattggccaatatcggactgataattccaccttgcggcattccgctgtacgtcccatgaaatcgccattgttccagataacccgccctgaggaacttccggataagccgtatggatcgttcgtcggagatacgttccttcaagatgtcgatcagaatatcatgattgacattgtcgaagaaaccttttatatctccttcgatgaaccacttcttacccgtaaaagtcttctgtacggcattcaatgcggtgtggcagctgcgatgcggacggaagccgtgcgaagtatcttcaaagtgaccttcgtaaatagcttccagtaccattcgtactacctcctgcaccagtttgtcgtcgaaagagggtacgccgagaggtcgtgtctttccgtttttcttcgggatgtgtactcttctcgatggctggggagagtagctttcgtctttcaacgaaaggatcagtttctcaatgcggggaaggctcatacggtcgatggtttctccgtctgcaccttgtgtcatattacccggcttggcatatattcgttgataagccaggtaatacatttcctcattgaaaagaatacgataaagcctctcaaacctgtattccgtggtttgactatgctttgtcagactgtttaatactcttgcgggacttctcataatgcctctcgcattttccgttaatcgtattaatgaatattagctgccgcccttcgccgtgtgcgaggctttccctcgctcggactactacggcggctccgttaccataccggatattcatagaccttcgtccaatagccttacggcattccggtttaggtaatccccgtttgcgatataataactatggcgcgacagattgtcggatatgacgtccgccttttactgcttattgcagttgcgtcgtgataagttcttgctctctctgtacaactaccacaatgagagtatcacgatatgacgagtatagttaccttaacgtcacagtttcggaaggtaccgctcaggctgtcattcaatcaatccggattttatcctcatatctgtctttcatcaccccattcagtcgcagtccggtaactaactgacttatggtttaccccgacatgctacactccctgtccggtttccctctcagataagtcggttgatgataggttatttgcaaagaacacttacctaatagcttgccatcactatatttattatatcgccttgacgggcacacagttattccccagcttttgaaattggaaataaaagtcattcagccgggcaataaactgcgtcttcgacgggtcgcgtttgatgacgacaaactcctcggcgaagattcttttgacgataaaacggctccggttatgctccgatcccgccttataaagcatctgcttaaagcggatattctcctccgtggtgagtttgaaattatacctgtggactctgggatctgtcgttgtcgggcgtccgatcctcttttttgaacttgtcatatcgtaggttgtaaggtggcgtgactcgggaacgccacccggcctcgcagagcgagcacctttcgtatgccgaaaattttttcggcatacgaaggtacagctcgctcgcctcaagtgaggcgaaaaatccgcggcggaaaaattttcgaaaaatctatgccaaacctccgctacggcttccgagggtgggtcgtttccctctgcaatattacaaccatgcgggcgtgtcccgtcctgaaaaaggtttacagtgattgataattaaagataaacattttggttcaaaaaatattgtcctgatataagtttacatatgccttccgaacaaccgtctttcggccccaatgatgtttgagtttcccggttctaagttccgcttccaagggcgtaagccaatcgcagct

SEQ ID NO: 7 - RNA, 1521 nt, Alistipes finegoldii
  source 1..1521: mol_type = rRNA
atggagagtttgatcctggctcaggatgaacgctagcggcaggcttaacacatgcaagtcgaggggcagcacgaggtagcaatactttggtggcgaccggcgcacgggtgcgtaacgcgtatgcaacctacctttaacaggggcataacactgagaaattggtactaattccccataacattcgagaaggcatcttcttgggttaaaaactccggtggttaaagatgggcatgcgttgtattagctagttggtgaggtaacggctcaccaaggcaacgatacatagggggactgagaggttaaccccccacattggtactgagacacggaccaaactcctacgggaggcagcagtgaggaatattggtcaatggacgcaagtctgaaccagccatgccgcgtgcaggaagacggctctatgagttgtaaactgcttttgtactagggtaaacgctcttacgtgtaggagcctgaaagtatagtacgaataaggatcggctaactccgtgccagcagccgcggtaatacggaggatccaagcgttatccggatttattgggtttaaagggtgcgtaggcggtttgataagttagaggtgaaataccggggctcaactccggaactgcctctaatactgttgaactagagagtagttgcggtaggcggaatgtatggtgtagcggtgaaatgcttagagatcatacagaacaccgattgcgaaggcagcttaccaaactatatctgacgttgaggcacgaaagcgtggggagcaaacaggattagataccctggtagtccacgcagtaaacgatgataactcgttgtcggcgatacacagtcggtgactaagcgaaagcgataagttatccacctggggagtacgttcgcaagaatgaaactcaaaggaattgacgggggcccgcacaagcggaggaacatgtggtttaattcgatgatacgcgaggaaccttacccgggcttgaaagttagtgacgattctggaaacaggatttcccttcggggcacgaaactaggtgctgcatggttgtcgtcagctcgtgccgtgaggtgtcgggttaagtcccataacgagcgcaacccctaccgttagttgccatcaggtcaagctgggcactctggcgggactgccggtgtaagccgagaggaaggtggggatgacgtcaaatcagcacggcccttacgtccggggctacacacgtgttacaatggtaggtacagagggccgctaccccgcgaggggatgccaatctcgaaagcctatctcagttcggatcggaggctgaaacccgcctccgtgaagttggattcgctagtaatcgcgcatcagccatggcgcggtgaatacgttcccgggccttgtacacaccgcccgtcaagccatggaagctgggggtgcctgaagttcgtgaccgcaaggagcgacctagggcaaaaccggtgactggggctaagtcgtaacaaggtagccgtaccggaaggtgcggctggaacacctccttt

SEQ ID NO: 8 - RNA, 1525 nt, Alistipes onderdonkii
  source 1..1525: mol_type = rRNA
atggagagtttgatcctggctcaggatgaacgctagcggcaggcctaacacatgcaagtcgaggggcatcgggattgaagcttgcttcaattgccggcgaccggcgcacgggtgcgtaacgcgtatgtaacctacctataacaggggcataacactgagaaattggtactaattccccataatattcggagaggcatctctccgggttgaaaactccggtggttatagatggacatgcgttgtattagctagttggtgaggtaacggctcaccaaggcaacgatacatagggggactgagaggttaaccccccacactggtactgagacacggaccagactcctacgggaggcagcagtgaggaatattggtcaatggacgcaagtctgaaccagccatgccgcgtgcaggaagacggctctatgagttgtaaactgcttttgtacgagggtaaactcacctacgtgtaggtgactgaaagtatcgtacgaataaggatcggctaactccgtgccagcagccgcggtaatacggaggattcaagcgttatccggatttattgggtttaaagggtgcgtaggcggtttgataagttagaggtgaaatcccggggcttaactccggaactgcctctaatactgttagactagagagtagttgcggtaggcggaatgtatggtgtagcggtgaaatgcttagagatcatacagaacaccgattgcgaaggcagcttaccaaactatatctgacgttgaggcacgaaagcgtggggagcaaacaggattagataccctggtagtccacgcagtaaacgatgataactcgttgtcggcgatacacagtcggtgactaagcgaaagcgataagttatccacctggggagtacgttcgcaagaatgaaactcaaaggaattgacgggggcccgcacaagcggaggaacatgtggtttaattcgatgatacgcgaggaaccttacccgggcttgaaagttactgacgattctggaaacaggatttcccttcggggcaggaaactaggtgctgcatggttgtcgtcagctcgtgccgtgaggtgtcgggttaagtcccataacgagcgcaacccctaccgttagttgccatcaggtcaagctgggcactctggcgggactgccggtgtaagccgagaggaaggtggggatgacgtcaaatcagcacggcccttacgtccggggctacacacgtgttacaatggtaggtacagagggtcgctaccccgcgaggggatgccaatctcgaaagcctatctcagttcggattggaggctgaaacccgcctccatgaagttggattcgctagtaatcgcgcatcagccatggcgcggtgaatacgttcccgggccttgtacacaccgcccgtcaagccatggaagctgggggtgcctgaagttcgtgaccgcaaggagcgacctagggcaaaaccggtaactggggctaagtcgtaacaaggtagccgtaccggaaggtgcggctggaacacctccttt

(The sequence listing continues in the following parts.)

1. A composition comprising a cell or a biologically pure culture of a bacterial strain selected from the group consisting of an
Alistipes shahii strain deposited under any one of accession numbers V21/014432, V21/014433, or V21/014434, or a derivative thereof;
a Gemmiger formicilis strain deposited under accession number V21/011520, or a derivative thereof; and
a Colonithrix sana strain deposited under accession number V21/019213 or V21/019214, or a derivative thereof.

2. (canceled)

3. (canceled)

4. (canceled)

5. A composition comprising a bacterial strain with a 16S rRNA sequence that is at least about 99%, 99.1%, 99.2%, 99.3%, 99.4%, 99.5%, 99.6%, 99.7%, 99.8%, or 99.9%, identical to any one of SEQ ID NOs: 1-3, 11-18, 27 or 44-47, or which has a 16S rRNA gene sequence represented by any one of any one of SEQ ID NOs: 1-3, 11-18, 27 or 44-47.

6. (canceled)

7. (canceled)

8. A pharmaceutical composition comprising a bacterial strain that is a phylogenetic descendant of a most recent common ancestor (MRCA) of A. timonensis and A. sp000434235, or G. variabile and G. sp002306375, or C. sana and C. sp002437735, and a pharmaceutically acceptable carrier, diluent, and/or excipient; and wherein the MRCA is defined at node 35260, node 23818 or node 23867 of a bac120 phylogenetic tree.

9. (canceled)

10. The composition of claim 1, wherein
the bacterial strain is at least partially isolated.

11. The composition of claim 1, wherein the bacterial strain is viable or non-viable.

12. (canceled)

13. (canceled)

14. (canceled)

15. (canceled)

16. The composition of claim 1, further comprising a prebiotic, optionally further comprising one or more additional bacterial strains.

17. (canceled)

18. (canceled)

19. (canceled)

20. The composition of claim 1, wherein the bacterial strain produces an agent that attenuates and/or impairs signal transducer and activator of transcription 3 (STAT3) signalling in a cell, and/or produces one or more metabolites selected from the group consisting of butyrate, acetate, ethanol, and fumarate.

21. The composition according to claim 20, wherein the agent is a small molecule, peptide, or nucleotide.

22. (canceled)

23. The composition according to claim 20, wherein the agent binds specifically to any one of STAT3, JAK2, TYK, or IL-23.

24. (canceled)

25. (canceled)

26. (canceled)

27. A method of restoring or improving gut barrier function in a subject, the method comprising administering to the subject the bacterial composition of claim 1, to thereby restore or improve gut barrier function.

28. (canceled)

29. (canceled)

30. (canceled)

31. The method of claim 27, wherein restoring or improving gut barrier function is characterised by at least one of: (i) an increase in the quality and/or quantity of mucin; (ii) improvement in integrity of tight junction proteins; (iii) reduction in translocation of luminal contents into systemic circulation; or (iv) a reduction of intestinal ulcers and/or intestinal wounds, wherein the luminal contents comprise lipopolysaccharide (LPS).

32. (canceled)

33. The method of claim 27, wherein the restoration or improvement in gut barrier dysfunction results in a reduction in systemic inflammation in the subject, wherein the systemic inflammation is identified in the subject when the level of an inflammatory cytokine in a sample from the subject is above a predetermined threshold, and wherein the inflammatory cytokine is selected from the group consisting of IL-1β, IL-8, IL-6, and TNF.

34. (canceled)

35. A method of inducing or enhancing mucosal healing in a subject, the method comprising administering to the subject the bacterial composition of claim 1 in an amount sufficient to induce epithelial cell migration and/or proliferation; to thereby induce mucosal healing in the subject.

36. (canceled)

37. (canceled)

38. (canceled)

39. The method of claim 35, wherein mucosal healing is measured using one or more fecal or serum markers, wherein the fecal marker is selected from the group consisting of calprotectin, lactoferrin, metalloproteinase (MMP)-9, and lipocalin-2.

40. (canceled)

41. (canceled)

42. A method of reducing inflammation in a subject, the method comprising administering to the subject a therapeutically effective amount of the bacterial composition of claim 1, to thereby reduce inflammation in the subject, wherein the inflammation is local to the gut environment, or is systemic inflammation.

43. (canceled)

44. (canceled)

45. (canceled)

46. (canceled)

47. (canceled)

48. A method of blocking and/or inhibiting activation of STAT3 signalling in a target cell, the method comprising contacting the target cell with at least a soluble component of a bacterial composition of claim 1, to block and/or inhibit the activation of STAT3 signalling in the target cell, wherein the target cell is selected from the group consisting of a reporter cell, an immune cell, an epithelial cell, and an endothelial cell.

49-390. (canceled)

391. The method of claim 48, wherein the reporter cell is a HEK cell.

392. The method of claim 48, wherein the immune cell is a Th17 immune cell.
